(19) United States
(12) Patent Application Publication
(10) Pub. No.: US 2024/0084274 A1
(43) Pub. Date: Mar. 14, 2024

(54) GENE EDITING COMPONENTS, SYSTEMS, AND METHODS OF USE

(71) Applicant: ReNAgade Therapeutics Management Inc., Cambridge, MA (US)

(72) Inventors: Giedrius Gasiunas, Vilnius (LT); Alim Ladha, Cambridge, MA (US); Vladimir Presnyak, Cambridge, MA (US); Muthusamy Jayaraman, Cambridge, MA (US)

(73) Assignee: ReNAgade Therapeutics Management Inc., Cambridge, MA (US)

(21) Appl. No.: 18/297,346

(22) Filed: Apr. 7, 2023

Related U.S. Application Data
(60) Provisional application No. 63/368,722, filed on Jul. 18, 2022.
(60) Provisional application No. 63/368,724, filed on Jul. 18, 2022.
(60) Provisional application No. 63/368,726, filed on Jul. 18, 2022.
(60) Provisional application No. 63/368,728, filed on Jul. 18, 2022.
(60) Provisional application No. 63/368,730, filed on Jul. 18, 2022.
(60) Provisional application No. 63/368,731, filed on Jul. 18, 2022.
(60) Provisional application No. 63/368,734, filed on Jul. 18, 2022.
(60) Provisional application No. 63/368,735, filed on Jul. 18, 2022.
(60) Provisional application No. 63/368,736, filed on Jul. 18, 2022.
(60) Provisional application No. 63/368,737, filed on Jul. 18, 2022.
(60) Provisional application No. 63/368,738, filed on Jul. 18, 2022.
(60) Provisional application No. 63/368,741, filed on Jul. 18, 2022.
(60) Provisional application No. 63/368,742, filed on Jul. 18, 2022.
(60) Provisional application No. 63/368,744, filed on Jul. 18, 2022.

(51) Int. Cl. C12N 9/22; C12N 9/78; C12N 9/12; C12N 15/90

(52) U.S. Cl. CPC C12N 9/22; C12N 9/78; C12N 9/1276; C12Y 207/07049; C12N 15/902; C07K 2319/09; C07K 2319/85; C12N 2310/20

(57) ABSTRACT

The present disclosure provides methods and compositions comprising novel Cas TypeV programmable nucleases and lipid nanoparticles capable of delivering the Cas TypeV programmable nucleases and genome editing systems comprising same. For therapeutic applications, as well as plants and industrial biotechnology.

### RELATED APPLICATIONS

[0001] This application claims priority under 35 U.S.C. § 119(e) to U.S. Provisional Application Ser. No. 63/368,722, filed Jul. 18, 2022 (Attorney Docket No. CSG001-P1); U.S. Provisional Application Ser. No. 63/368,724, filed Jul. 18, 2022 (Attorney Docket No. CSG001-P2); U.S. Provisional Application Ser. No. 63/368,726, filed Jul. 18, 2022 (Attorney Docket No. CSG001-P3); U.S. Provisional Application Ser. No. 63/368,728, filed Jul. 18, 2022 (Attorney Docket No. CSG001-P4); U.S. Provisional Application Ser. No. 63/368,730, filed Jul. 18, 2022 (Attorney Docket No. CSG001-P5); U.S. Provisional Application Ser. No. 63/368,731, filed Jul. 18, 2022 (Attorney Docket No. CSG001-P6); U.S. Provisional Application Ser. No. 63/368,734, filed Jul. 18, 2022 (Attorney Docket No. CSG001-P7); U.S. Provisional Application Ser. No. 63/368,735, filed Jul. 18, 2022 (Attorney Docket No. CSG001-P8); U.S. Provisional Application Ser. No. 63/368,736, filed Jul. 18, 2022 (Attorney Docket No. CSG001-P9); U.S. Provisional Application Ser. No. 63/368,737, filed Jul. 18, 2022 (Attorney Docket No. CSG001-P10); U.S. Provisional Application Ser. No. 63/368,738, filed Jul. 18, 2022 (Attorney Docket No. CSG001-P11); U.S. Provisional Application Ser. No. 63/368,741, filed Jul. 18, 2022 (Attorney Docket No. CSG001-P12); U.S. Provisional Application Ser. No. 63/368,742, filed Jul. 18, 2022 (Attorney Docket No. CSG001-P13); U.S. Provisional Application Ser. No. 63/368,744, filed Jul. 18, 2022 (Attorney Docket No. CSG001-P14); each of which are incorporated herein by reference in their entireties.

[0002] The foregoing applications, and all documents cited therein or during their prosecution (“appln cited documents”) and all documents cited or referenced in the appln cited documents, and all documents cited or referenced herein (“herein cited documents”), and all documents cited or referenced in herein cited documents, together with any manufacturer's instructions, descriptions, product specifications, and product sheets for any products mentioned herein or in any document incorporated by reference herein, are hereby incorporated herein by reference, and may be employed in the practice of the invention. More specifically, all referenced documents are incorporated by reference to the same extent as if each individual document was specifically and individually indicated to be incorporated by reference.

### SEQUENCE LISTING

[0003] This application contains a sequence listing filed in electronic form in eXtensible Markup Language (XML) format entitled J0356-00003SL.xml, created on Apr. 7, 2023 and amended on Apr. 25, 2023 and having a size of 1,797,596 bytes. The content of the sequence listing is incorporated herein in its entirety.

### TECHNICAL FIELD

[0004] The present disclosure generally relates to systems, methods and compositions used for precise genome editing, including nucleic acid insertions, replacements, and deletions at targeted and precise genome sites, wherein said systems, methods, and compositions are based on novel and/or engineered class II/type V Clustered Regularly Interspaced Short Palindromic Repeats (CRISPR)-Cas system.

### BACKGROUND

[0005] Genome editing tools encompass a diverse set of technologies that can make many types of genomic alterations in various contexts. These technologies have evolved over the last couple of decades to provide a range of user-programmable editing tools that include ZFN (zinc finger) nuclease editing systems, meganuclease editing systems, and TALENS (transcription activator-like effector nucleases). The past decade has seen an explosive growth in a new generation of genome editing systems based on components from bacterial immune pathways, including CRISPR (clustered regularly interspaced short palindromic repeats) and the associated CRISPR-associated proteins (e.g., CRISPR-Cas9) (Jinek et al., “A programmable dual-RNA-guided DNA endonuclease in adaptive bacterial immunity,” Science, Vol. 337 (6096), pp. 816-821), meganuclease editors (Boissel et al., “megaTALs: a rare-cleaving nuclease architecture for therapeutic genome engineering,” Nucleic Acids Research 42: pp. 2591-2601) and bacterial retron systems (Schubert et al., “High-throughput functional variant screens via in vivo production of single-stranded DNA,” PNAS, Apr. 27, 2021, Vol. 118(18), pp. 1-10). In particular, CRISPR-Cas9 has been derivatized in numerous ways to expand upon its guide RNA-based programmable double-strand cutting activity to form systems ranging from finding alternative CRISPR Cas nuclease enzymes having different PAM requirements and cutting properties (e.g., Cas12a, Cas12f, Cas13a, and Cas13b) to base editing (Komor et al., “Programmable editing of a target base in genomic DNA without double-stranded DNA cleavage,” Nature, May 19, 2016, 533 (7603); pp. 420-424 [cytosine base editors or CBEs] and Gaudelli et al., “Programmable base editing of A-T to G-C in genomic DNA without DNA cleavage,” Nature, Vol. 551, pp. 464-471 [adenine base editors or ABEs]) to prime editing (Anzalone et al., “Search-and-replace genome editing without double-strand breaks or donor DNA,” Nature, December 2019, 576 (7789): pp. 149-157) to twin prime editing (Anzalone et al., “Programmable deletion, replacement, integration and inversion of large DNA sequences with twin prime editing,” Nature Biotechnology, Dec. 9, 2021, vol. 40, pp. 731-740) to epigenetic editing (Kungulovski and Jeltsch, “Epigenome Editing: State of the Art, Concepts, and Perspective,” Trends in Genetics, Vol. 32, 206, pp. 101-113) to CRISPR-directed integrase editing (Yarnell et al., “Drag-and-drop genome insertion of large sequences without double-stranded DNA cleavage using CRISPR-directed integrases,” Nature Biotechnology, Nov. 24, 2022, doi.org/10.1038/s41587-022-01527-4 (“PASTE”)).

[0006] In particular, application of CRISPR-associated systems (“CRISPR-Cas systems”) in human therapeutics is anticipated to be curative in ameliorating various monogenic diseases and disorders. Current clinical trials are underway to treat, for instance, Transfusion-dependent β-thalassemia (TDT) and sickle cell disease (SCD) by the autologous transfusion of CRISPR/Cas9-edited CD34+ hematopoietic stem cells Frangoul, Haydar et al. “CRISPR-Cas9 Gene Editing for Sickle Cell Disease and (3-Thalassemia.” The New England journal of medicine vol. 384, 3 (2021): 252-260. doi:10.1056/NEJMoa2031054 and ATTR amyloidosis Gillmore, Julian D et al. “CRISPR-Cas9 In Vivo Gene Editing for Transthyretin Amyloidosis.” The New England journal of medicine vol. 385, 6 (2021): 493-502. doi:10.1056/NEJMoa2107454, which is incorporated herein by reference.

[0007] The potential of such CRISPR-Cas systems has sparked the discovery of many novel CRISPR-Cas variants where such systems have been classified into 2 classes (i.e., class I and II) and 6 types and 33 subtypes based on their genes, protein subunits and the structure of their gRNAs. Makarova, K. S., Wolf, Y. I., Iranzo, J. et al. Evolutionary classification of CRISPR-Cas systems: a burst of class 2 and derived variants. Nat Rev Microbiol 18, 67-83 (2020). doi:10.1038/s41579-019-0299-x, which is incorporated herein by reference.

[0008] Among the diverse CRISPR-Cas systems, class II has the most extensive applications in gene editing due to its earlier discovery and by virtue of it having only one effector protein. By contrast, the effector nucleases of the type V family are diverse due to extensive diversity over the N-terminus of the protein, as evident by comparing the crystal structures of Cas12a, Cas12b, and Cas12e type V nucleases (Tong et al., “The Versatile Type V CRISPR Effectors and Their Application Prospects,” Front. Cell Dev. Biol., 2021, vol. 8). The C-terminus regions of the type V effector nucleases are more highly conserved, however, which comprise a conserved RuvC-like endonuclease (RuvC) domain. It is reported that the RuvC domain of type V effectors is derived from the TnpB protein encoded by autonomous or non-autonomous transposons (Shmakov et al., “Diversity and evolution of class 2 CRISPR-Cas systems,” 2017, Nat. Rev. Microbiol. 15, 169-182. doi: 10.1038/nrmicro.2016.184). The type V systems are further subdivided into many subtypes, including types V-A to V-I, type V-K, type V-U, and CRISPR-Cas0 (Hajizadeh et al., “The expanding class 2 CRISPR toolbox: diversity, applicability, and targeting drawbacks,” 2019, BioDrugs 33, 503-513. doi: 10.1007/s40259-019-00369-y). The corresponding effector nucleases in these various subtypes have shown a range of different substrates, including some that act only on double-stranded DNA (dsDNA), but also those that act on both dsDNA as well as single-stranded DNA (ssDNA), and those that act on single-stranded RNA (ssRNA). This multifunctionality has put the type V CRISPR-Cas system into the focus of recent studies.

[0009] While a number of CRISPR-Cas type V systems have been used for various applications, including gene editing, reported drawbacks have been published to indicate the need for improved CRISPR-Cas type V systems for suitability of desired applications. Therefore, there remains much room for improvement and design to achieve an effective type V CRISPR-Cas system for gene editing that bears sufficient editing efficiency, improved precision, better deliverability, and which remains affordable, easy to scale, and has improved ability to treat various genetic disorders and complex diseases.

### SUMMARY

[0010] The present disclosure provides Cas TypeV-based gene editing systems for use in various applications, including precision gene editing in cells, tissues, organs, or organisms. In various embodiments, the Cas TypeV-based gene editing systems comprise (a) a Type V polypeptide and (b) a Type V guide RNA which is capable of associating with a Type V polypeptide to form a complex such that the complex localizes to a target nucleic acid sequence (e.g., a genomic or plasmid target sequence) and binds thereto. In various embodiments, the Type V polypeptide has a nuclease activity which results in the cutting of both strands of DNA.

[0011] In various embodiments, the Cas Type V polypeptide is a polypeptide selected from Table S15A, or a polypeptide having at least 70%, 75%, 80%, 85%, 90%, 95%, 99%, or 100% sequence identity with a polypeptide from Table S15A. In various other embodiments, the Cas Type V polypeptide is encoded by a polynucleotide sequence selected from Table S15B, or a polynucleotide having at least 70%, 75%, 80%, 85%, 90%, 95%, 99%, or 100% sequence identity with a polynucleotide of Table S15B. In various other embodiments, the Cas12a guide RNA is selected from any Cas Type V guide sequence disclosed in Table S15C, or a nucleic acid molecule having at least 70%, 75%, 80%, 85%, 90%, 95%, 99%, or 100% sequence identity with a Cas12a guide sequence of Table S15C.

[0012] In various embodiments, the Cas Type V guide RNA may comprise (a) a portion that binds or associates with a Cas Type V polypeptide and (b) a region that comprises a targeting sequence, i.e., a sequence which is complementary to target nucleic acid sequence. For Cas Type V guide RNA designs, just like for Cas9 guide RNA, the target sequence is typically next to a PAM sequence. But for Cas Type V, the PAM sequence in various embodiments is typically TTTV, where V typically represents A, C, or G. In various embodiments, the “V” of the TTTV is immediately adjacent to the most 5′ base of the non-targeted strand side of the protospacer element. As for Cas9 guide RNA designs, the PAM sequence is typically not included in the guide RNA design.

[0013] In various embodiments, the guide RNA for Cas Type V is relatively short at only approximately 40-44 bases long. The part that base pairs to the protospacer in the target sequence is 20-24 bases in length, and there is also a constant about 20-base section that binds to Cas Type V.

[0014] In various embodiments, nomenclature for a Cas Type V guide RNA is referred to as a “crRNA” and there is no Cas9-like “tracrRNA” component.

[0015] In other aspects, the Cas Type V-based gene editing systems may comprise one or more additional accessory proteins having genome modifying functions, including recombinases, invertases, nucleases, polymerases, ligases, deaminases, reverse transcriptases, or epigenetic modifying functions. In various embodiments, the accessory proteins may be provided separately. In other embodiments, the accessory proteins may be fused to a Cas Type V nuclease, optionally with a linker.

[0016] In still another aspect, the disclosure provides delivery systems for introducing the Cas Type V-based gene editing systems or components thereof into cells, tissues, organs, or organisms. Depending on the chosen format, the Cas Type V-based gene editing systems and/or the individual or combined components thereof may be delivered as DNA molecules (e.g., encoded on one or more plasmids), RNA molecules (e.g., guide RNAs for targeting the Cas Type V protein or linear or circular mRNAs coding for the Cas Type V protein or accessory protein components of the Cas Type V-based gene editing systems), proteins (e.g., Cas12a polypeptides, accessory proteins having other functions (e.g., recombinases, nucleases, polymerases, ligases, deaminases, or reverse transcriptases), or protein-nucleic acid complexes (e.g., complexes between a guide RNA and a Cas Type V protein or fusion protein comprising a Cas Type V protein).

[0017] In another aspect, the present disclosure provides nucleic acid molecules encoding the Cas Type V-based gene editing systems or components thereof. In yet another aspect, the disclosure provides vectors for transferring and/or expressing said Cas Type V-based gene editing systems, e.g., under in vitro, ex vivo, and in vivo conditions. In still another aspect, the disclosure provides cell-delivery compositions and methods, including compositions for passive and/or active transport to cells (e.g., plasmids), delivery by virus-based recombinant vectors (e.g., AAV and/or lentivirus vectors), delivery by non-virus-based systems (e.g., liposomes and LNPs), and delivery by virus-like particles of the Cas Type V-based gene editing systems described herein. Depending on the delivery system employed, the Cas Type V-based gene editing systems described herein may be delivered in the form of DNA (e.g., plasmids or DNA-based virus vectors), RNA (e.g., guide RNA and mRNA delivered by LNPs), a mixture of DNA and RNA, protein (e.g., virus-like particles), and ribonucleoprotein (RNP) complexes. Any suitable combinations of approaches for delivering the components of the herein disclosed Cas Type V-based gene editing systems may be employed.

[0018] In other embodiments, the Cas Type V-based gene editing systems may comprise a template DNA comprising an edit, e.g., a single strand or double strand donor molecule (linear or circular) which may be used by the cell to repair a single or double cut lesion introduced by a Cas Type V-based gene editing systems by way of cellular repair processes, including homology-dependent repair (HDR) (e.g., in dividing cells) or non-homologous end joining (NHEJ) (in non-dividing cells).

[0019] In one embodiment, each of the components of the Cas Type V-based gene editing systems is delivered by an all-RNA system, e.g., the delivery of one or more RNA molecules (e.g., mRNA and/or guide RNA) by one or more LNPs, wherein the one or more RNA molecules form the guide RNA and/or are translated into the polypeptide components (e.g., the Cas Type V polypeptides and/or any accessory proteins), and a DNA or RNA-encoded template DNA molecule (e.g., donor template), as appropriate or desired.

[0020] In yet another aspect, the disclosure provides methods for genome editing by introducing a Cas Type V-based gene editing system described herein into a cell (e.g., under in vitro, in vivo, or ex vivo conditions) comprising a target edit site, thereby resulting in an edit at the target edit. In other aspects, the disclosure provides formulations comprising any of the aforementioned components for delivery to cells and/or tissues, including in vitro, in vivo, and ex vivo delivery, recombinant cells and/or tissues modified by the recombinant Cas Type V-based gene editing systems and methods described herein, and methods of modifying cells by conducting genome editing using the herein disclosed Cas Type V-based gene editing systems.

[0021] The disclosure also provides methods of making the Cas Type V-based gene editing systems, their protein and nucleic acid molecule components, vectors, compositions and formulations described herein, as well as to pharmaceutical compositions and kits for modifying cells under in vitro, in vivo, and ex vivo conditions that comprise the herein disclosed genome editing and/or modification systems.

[0022] In various aspects, the invention provides an isolated or recombinant polynucleotide comprising or consisting of a nucleic acid sequence selected from the group consisting of:
[0023] (a) a nucleic acid sequence that encodes a Cas Type V polypeptide having the amino acid sequence of SEQ ID NO: 334 (No. ID405), SEQ ID NO: 58 (No. ID414), or SEQ ID NO: 564 (No. ID418), SEQ ID NO: 335 (No. ID406), SEQ ID NO: 331 (No. ID411), SEQ ID NO: 20 (No. ID415), or SEQ ID NO: 445 (No. ID419);
[0024] (b) a nucleic acid sequence that encodes a polypeptide at least 50%, at least 55%, at least 60%, at least 65%, at least 70%, at least 75%, at least 80%, at least 85%, at least 90%, at least 91%, at least 92%, at least 93%, at least 94%, at least 95%, at least 96%, at least 97%, at least 98%, at least 99%%, at least 99.1%, at least 99.2%, at least 99.3%, at least 99.4%, at least 99.5%, at least 99.6%, at least 99.7%, at least 99.8% or at least 99.9% identical to a Cas Type V polypeptide of SEQ ID NO: 334 (No. ID405), SEQ ID NO: 58 (No. ID414), or SEQ ID NO: 564 (No. ID418), SEQ ID NO: 335 (No. ID406), SEQ ID NO: 331 (No. ID411), SEQ ID NO: 20 (No. ID415), or SEQ ID NO: 445 (No. ID419);
[0025] (c) a nucleic acid sequence that is a degenerate variant of the nucleic acid sequence in (a) or (b); and
[0026] (d) a nucleic acid sequence that hybridizes under stringent conditions to the nucleic acid sequence in in (a) or (b).

[0027] In related aspects, the invention provides an isolated or recombinant guide RNA comprising or consisting of a nucleic acid sequence selected from the group consisting of:
[0028] (a) one or more crRNA direct repeat sequences or a reverse complement selected from (Group 1) SEQ ID NO:7-12; (Group 2) SEQ ID NO:24-27; (Group 3) SEQ ID NO:36-39; (Group 4) SEQ ID NO:49-52; (Group 5) SEQ ID NO:63-68; (Group 6) SEQ ID NO:84-91; (Group 7) SEQ ID NO:106-111; (Group 8) SEQ ID NO:122-125; (Group 9) SEQ ID Nos:211-290; (Group 10) SEQ ID NO:343-354; (Group 11) SEQ ID NO:374-379; (Group 12) SEQ ID NO:390-393; (Group 13) SEQ ID NO:411-422; and (Group 14) SEQ ID NO:500-541;
[0029] (b) 20 to 35 nucleotides or up to the length of the crRNA from the 3′ end of the crRNA direct repeat sequences or a reverse complement (a) linked to a targeting guide attached to the 3′ end of the direct repeat sequence that is of 16-30 nucleotides in length;
[0030] (c) (Group 1) SEQ ID NO:13-15; (Group 2) SEQ ID NO:28-29; (Group 3) SEQ ID NO:40-41; (Group 4) SEQ ID NO:53-54; (Group 5) SEQ ID NO:69-71; (Group 6) SEQ ID NO:92-95; (Group 7) SEQ ID NO:112-114; (Group 8) SEQ ID NO:126-127; (Group 9) SEQ ID NO:291-330; (Group 10) SEQ ID NO:355-360; (Group 11) SEQ ID NO:380-382; (Group 12) SEQ ID NO:394-395; (Group 13) SEQ ID NO:423-428; and (Group 14) SEQ ID NO:542-563;
[0031] (d) a nucleic acid sequence that is a degenerate variant of (Group 1) SEQ ID NO:13-15; (Group 2) SEQ ID NO:28-29; (Group 3) SEQ ID NO:40-41; (Group 4) SEQ ID NO:53-54; (Group 5) SEQ ID NO:69-71; (Group 6) SEQ ID NO:92-95; (Group 7) SEQ ID NO:112-114; (Group 8) SEQ ID NO:126-127; (Group 9) SEQ ID NO:291-330; (Group 10) SEQ ID NO:355-360; (Group 11) SEQ ID NO:380-382; (Group 12) SEQ ID NO:394-395; (Group 13) SEQ ID NO:423-428; and (Group 14) SEQ ID NO:542-563;
[0032] (e) a nucleic acid sequence at least 70%, at least 71%, at least 72%, at least 73%, at least 74%, at least 75%, at least 76%, at least 77%, at least 78%, at least 79%, at least 80%, at least 81%, at least 82%, at least 83%, at least 84%, at least 85%, at least 90%, at least 95%, at least 98%, at least 99% or at least 99.9% identical to: (Group 1) SEQ ID NO:13-15; (Group 2) SEQ ID NO:28-29; (Group 3) SEQ ID NO:40-41; (Group 4) SEQ ID NO:53-54; (Group 5) SEQ ID NO:69-71; (Group 6) SEQ ID NO:92-95; (Group 7) SEQ ID NO:112-114; (Group 8) SEQ ID NO:126-127; (Group 9) SEQ ID NO:291-330; (Group 10) SEQ ID NO:355-360; (Group 11) SEQ ID NO:380-382; (Group 12) SEQ ID NO:394-395; (Group 13) SEQ ID NO:423-428; and (Group 14) SEQ ID NO:542-563; and
[0033] (f) a nucleic acid sequence that hybridizes under stringent conditions to: (Group 1) SEQ ID NO:13-15; (Group 2) SEQ ID NO:28-29; (Group 3) SEQ ID NO:40-41; (Group 4) SEQ ID NO:53-54; (Group 5) SEQ ID NO:69-71; (Group 6) SEQ ID NO:92-95; (Group 7) SEQ ID NO:112-114; (Group 8) SEQ ID NO:126-127; (Group 9) SEQ ID NO:291-330; (Group 10) SEQ ID NO:355-360; (Group 11) SEQ ID NO:380-382; (Group 12) SEQ ID NO:394-395; (Group 13) SEQ ID NO:423-428; and (Group 14) SEQ ID NO:542-563.

[0034] In some embodiments, the isolated or recombinant polynucleotide comprising or consisting of a nucleic acid sequence encoding one or more Cas Type V polypeptides of the disclosure is paired with one or more cognate guide RNA of the disclosure.

[0035] In certain exemplary aspects, provided herein is a Cas Type V gene editing system comprising:
[0036] (a) one or more polypeptide sequences comprising at least 45%, 46%, 47%, 48%, 49%, 50%, 51%, 52%, 53%, 54%, 55%, 56%, 57%, 58%, 59%, 60%, 61%, 62%, 63%, 64%, or 65% sequence identity to any one of sequences selected from SEQ ID NO: 334 (No. ID405), SEQ ID NO: 58 (No. ID414), or SEQ ID NO: 564 (No. ID418), SEQ ID NO: 335 (No. ID406), SEQ ID NO: 331 (No. ID411), SEQ ID NO: 20 (No. ID415), and SEQ ID NO: 445 (No. ID419); and
[0037] (b) one or more polynucleotide sequences comprising a guide RNA, wherein the guide RNA comprises a complementary sequence to that of a targeted polynucleotide sequence.

[0038] In various embodiments, disclosed is a method of modifying a targeted polynucleotide sequence, said method comprising:
[0039] (a) one or more polypeptide sequences comprising at least 45%, 46%, 47%, 48%, 49%, 50%, 51%, 52%, 53%, 54%, 55%, 56%, 57%, 58%, 59%, 60%, 61%, 62%, 63%, 64%, or 65% sequence identity to any one of sequences selected from SEQ ID NO: 334 (No. ID405), SEQ ID NO: 58 (No. ID414), or SEQ ID NO: 564 (No. ID418), SEQ ID NO: 335 (No. ID406), SEQ ID NO: 331 (No. ID411), SEQ ID NO: 20 (No. ID415), and SEQ ID NO: 445 (No. ID419); and
[0040] (b) one or more polynucleotide sequences comprising a guide RNA, wherein the guide RNA comprises a complementary sequence to that of a targeted polynucleotide sequence; and (c) introducing into a host cell the one or more polypeptide sequences of (a) and the one or more polynucleotide sequences of (b) in a delivery vector;
[0041] wherein the polypeptide sequence is configured to form a ribonucleoprotein complex with the guide RNA, and wherein the ribonucleoprotein complex modifies a targeted polynucleotide sequence.

[0042] In certain preferred embodiments, the method comprises contacting the host cell with a guide RNA, wherein the guide RNA optionally forms a ribonucleoprotein complex with the polypeptide and the guide RNA.

[0043] In various aspects, the present disclosure provides delivery of a Cas12a-based gene editing system described herein Cas12a in various viral and non-viral vectors. In certain preferred embodiments, the LNP comprises:
[0044] a) one or more ionizable lipids;
[0045] b) one or more structural lipids;
[0046] c) one or more PEGylated lipids; and
[0047] d) one or more phospholipids.

[0048] In certain embodiments, the LNP comprises one or more ionizable lipids selected from the group consisting of those disclosed in Table X.

[0049] Also provided herein are pharmaceutical compositions comprising a site-specific modification of a target region of a host cell genome comprising a Cas Type V-based gene editing system described herein Cas Type V comprising one or more Cas Type V polypeptides; one or more cognate guide RNA; and LNP suitable for therapeutic administration.

[0050] In various aspects, provided herein is a method of treating a subject in need thereof, comprising administering to the subject a pharmaceutical composition described herein. In some embodiments, the subject is ameliorated from a diseases or disorders including but not limited to various monogenic diseases or disorders.

[0051] In various embodiments, the disclosure relates to the following numbered paragraphs:

[0052] 1. A genome editing system comprising:
[0053] (a) a Cas Type V polypeptide or variant thereof, or a nucleic acid sequence encoding a Cas Type V polypeptide or variant thereof;
[0054] (b) a second nucleic acid sequence encoding a guide RNA;
[0055] wherein the Cas Type V polypeptide and the guide RNA form an RNA-protein complex;
[0056] wherein the genome editing system optionally further comprises a donor nucleic acid sequence capable of modifying a target sequence.

[0057] 2. The genome editing system of paragraph 1, wherein the Cas Type V polypeptide or variant thereof is a polypeptide selected from Table S15A (SEQ ID NO: 334 (No. ID405), SEQ ID NO: 58 (No. ID414), or SEQ ID NO: 564 (No. ID418), SEQ ID NO: 335 (No. ID406), SEQ ID NO: 331 (No. ID411), SEQ ID NO: 20 (No. ID415), and SEQ ID NO: 445 (No. ID419)), or a polypeptide having at least 70%, 75%, 80%, 85%, 90%, 95%, 99%, or 100% sequence identity with a polypeptide from Table S15A (SEQ ID NO: 334 (No. ID405), SEQ ID NO: 58 (No. ID414), or SEQ ID NO: 564 (No. ID418), SEQ ID NO: 335 (No. ID406), SEQ ID NO: 331 (No. ID411), SEQ ID NO: 20 (No. ID415), and SEQ ID NO: 445 (No. ID419)).

[0058] 3. The genome editing system of paragraph 1, wherein the Cas12a polypeptide is encoded by a polynucleotide sequence selected from Table S15B (SEQ ID NO: 365 (No. ID405), SEQ ID NO: 75 (No. ID414), or SEQ ID NO: 565 (No. ID418), SEQ ID NO: 366 (No. ID406), SEQ ID NO: 331 (No. ID411), SEQ ID NO: 30 (No. ID415), or SEQ ID NO: 445 (No. ID419)), or a polynucleotide having at least 70%, 75%, 80%, 85%, 90%, 95%, 99%, or 100% sequence identity with a polypeptide from Table S15B (SEQ ID NO: 365 (No. ID405), SEQ ID NO: 75 (No. ID414), or SEQ ID NO:565 (No. ID418), SEQ ID NO: 366 (No. ID406), SEQ ID NO: 331 (No. ID411), SEQ ID NO: 30 (No. ID415), or SEQ ID NO: 445 (No. ID419)).

[0059] 4. The genome editing system of paragraph 1, wherein the Cas Type V guide RNA is selected from any Cas Type V guide sequence disclosed in Table S15C (SEQ ID NO:28-29, 69-71, 355-360, 542-563), or a nucleic acid molecule having at least 70%, 75%, 80%, 85%, 90%, 95%, 99%, or 100% sequence identity with a Cas Type V guide sequence of Table S15C.

[0060] 5. The genome editing system of paragraph 1, wherein the Cas Type V polypeptide or variant thereof is operably fused to an accessory domain.

[0061] 6. The genome editing system of paragraph 5, wherein the accessory domain is a deaminase domain, nuclease domain, reverse transcriptase domain, integrase domain, recombinase domain, transposase domain, endonuclease domain, or exonuclease domain.

[0062] 7. The genome editing system of paragraph 1, wherein the Cas Type V polypeptide or variant thereof is operably fused to a deaminase domain.

[0063] 8. The genome editing system of paragraph 1, wherein the Cas Type V polypeptide or variant thereof is operably fused to a reverse transcriptase domain.

[0064] 9. The genome editing system of paragraph 1, wherein the Cas Type V polypeptide or variant thereof is operably fused to a recombinase domain.

[0065] 10. The genome editing system of paragraph 1, wherein the Cas Type V polypeptide or variant thereof is operably fused to an integrase domain.

[0066] 11. The genome editing system of paragraph 1, wherein the Cas Type V polypeptide or variant thereof is operably fused to a transposase domain.

[0067] 12. The genome editing system of paragraph 1, wherein the Cas Type V polypeptide or variant thereof is engineered to have an enhanced genome editing efficiency relative to a wildtype SpCas9.

[0068] 13. The genome editing system of paragraph 12, wherein the enhanced genome editing efficiency comprises at least two to fivefold increase in editing efficiency relative to a wildtype SpCas9.

[0069] 14. The genome editing system of any one of the above paragraphs wherein the donor nucleic acid sequence repairs the target region of the genome editing system genome cleaved by the RNA-protein complex.

[0070] 15. The genome editing system of any one of the above paragraphs wherein the nucleic acid sequence encoding the Cas Type V polypeptide and the guide RNA are transiently expressed in the host cell genome.

[0071] 16. The genome editing system of any one of the above paragraphs wherein the nucleic acid sequence encoding the Cas Type V polypeptide and the guide RNA are integrated into and expressed from the host cell genome.

[0072] 17. The genome editing system of any one of the above paragraphs wherein the nucleic acid sequence encoding the Cas Type V polypeptide and the guide RNA are integrated into and expressed from a plasmid.

[0073] 18. The genome editing system of any one of the above paragraphs wherein the genome editing system further comprises a donor nucleic acid sequence to modify a target region of the host cell genome.

[0074] 19. The genome editing system of any one of the above paragraphs wherein administering the system to a host cell results in one or more edits.

[0075] 20. The genome editing system of claim 19, wherein the one or more edits comprises an insertion, deletion, base change/substitution, or inversion, or a combination thereof.

[0076] 21. The genome editing system of claim 19, wherein the one or more edits comprises a modification in the nucleobase sequence of a target nucleic acid molecule.

[0077] 22. The genome editing system of claim 19, wherein the one or more edits comprises a whole-exon insertion, deletion, or substitution.

[0078] 23. The genome editing system of claim 19, wherein the one or more edits comprises a whole-intron insertion, deletion, or substitution.

[0079] 24. The genome editing system of claim 19, wherein the one or more edits comprises a whole-gene insertion, deletion, or substitution.

[0080] 25. The genome editing system of claim 19, wherein the one or more edits comprises an edit to the sequence of a gene or to a region of a gene, e.g., an exon or intron.

[0081] 26. The genome editing system of any one of the above paragraphs wherein the Cas Type V polypeptide recognizes a protospacer-adjacent motif (PAM).

[0082] 27. The genome editing system of any one of the above paragraphs wherein the genome editing system installs one or more desired sequence modifications of one or more monogenic disorders or diseases.

[0083] 28. The genome editing system of any one of the above paragraphs wherein the genome editing system installs one or more desired epigenetic modifications of one or more monogenic disorders or diseases.

[0084] 29. The genome editing system of any one of the above paragraphs wherein the Cas Type V polypeptide comprises one or more modifications in one or more domains selected from (a) a nuclease domain (e.g., RuvC domain) and (b) a PAM-interacting domain.

[0085] 30. The genome editing system of any one of the above paragraphs further comprising a delivery vector.

[0086] 31. The genome editing system of paragraph 30, wherein the delivery vector is selected from viral vector is selected from a retroviral vector, a lentiviral vector, an adenoviral, an adeno-associated viral vector, vaccinia viral vector, poxviral vector, and herpes simplex viral vector.

[0087] 32. The genome editing system of paragraph 30, wherein the delivery vector comprises a non-viral vector selected from cationic liposomes, lipid nanoparticles (LNPs), cationic polymers, vesicles, and gold nanoparticles.

[0088] 33. The genome editing system of any one of the above paragraphs wherein the modification of the target sequence of the host cell genome comprises binding activity, cleavage activity, nickase activity, deaminase activity, reverse transcriptase activity, transcriptional activation activity, transcriptional inhibitory activity, or transcriptional epigenetic activity.

[0089] 34. The genome editing system of any one of the above paragraphs wherein any of the nucleic acid molecules—including any guide RNA or donor DNA—comprises one or more chemical modifications selected from 2′-O-Me, 2′-F, and 2′F-ANA at 2′OH; 2′F-4′-Cα-OMe and 2′,4′-di-Cα-OMe at 2′ and 4′ carbons; phosphodiester modifications comprising sulfide-based Phosphorothioate (PS) or acetate-based phosphonoacetate alterations; combinations of the ribose and phosphodiester modifications; locked nucleic acid (LNA), bridged nucleic acids (BNA), S-constrained ethyl (cEt), and unlocked nucleic acid (UNA); modifications to produce a phosphodiester bond between the 2′ and 5′ carbons (2′,5′-RNA) of adjacent RNAs; and a butane 4-carbon chain link between adjacent RNAs.

[0090] 35. The genome editing system of any one of the above paragraphs wherein any guide RNA comprises one or more chemical modifications selected from 2′-O-Me, 2′-F, and 2′F-ANA at 2′OH; 2′F-4′-Cα-OMe and 2′,4′-di-Cα-OMe at 2′ and 4′ carbons; phosphodiester modifications comprising sulfide-based Phosphorothioate (PS) or acetate-based phosphonoacetate alterations; combinations of the ribose and phosphodiester modifications; locked nucleic acid (LNA), bridged nucleic acids (BNA), S-constrained ethyl (cEt), and unlocked nucleic acid (UNA); modifications to produce a phosphodiester bond between the 2′ and 5′ carbons (2′,5′-RNA) of adjacent RNAs; and a butane 4-carbon chain link between adjacent RNAs.

[0091] 36. The genome editing system of any one of the above paragraphs wherein any donor or template DNA comprises one or more chemical modifications selected from 2′-O-Me, 2′-F, and 2′F-ANA at 2′OH; 2′F-4′-Cα-OMe and 2′,4′-di-Cα-OMe at 2′ and 4′ carbons; phosphodiester modifications comprising sulfide-based Phosphorothioate (PS) or acetate-based phosphonoacetate alterations; combinations of the ribose and phosphodiester modifications; locked nucleic acid (LNA), bridged nucleic acids (BNA), S-constrained ethyl (cEt), and unlocked nucleic acid (UNA); modifications to produce a phosphodiester bond between the 2′ and 5′ carbons (2′,5′-RNA) of adjacent RNAs; and a butane 4-carbon chain link between adjacent nucleotides.

[0092] 37. A method for editing the DNA of a host cell,
[0093] a) producing one or more compositions comprising:
[0094] 1. a Cas Type V polypeptide or a nucleic acid sequence encoding a Cas Type V polypeptide;
[0095] 2. a second nucleic acid sequence encoding a guide RNA, wherein the second nucleic acid sequence and the Cas Type V polypeptide form an RNA-protein complex;
[0096] wherein the genome editing system optionally further comprises a donor nucleic acid sequence capable of modifying a target sequence; and
[0097] b) introducing the composition into a host cell;
[0098] c) optionally selecting for the host cell comprising the modification or the donor nucleic acid sequence into the host cell genome; and
[0099] d) optionally culturing the edited host cells under conditions sufficient for growth.

[0100] 38. The method of paragraph 37, wherein the Cas Type V polypeptide is:
[0101] a. operably fused to a nuclease;
[0102] b. operably fused to a deaminase;
[0103] c. operably fused to a reverse transcriptase;
[0104] d. operably fused to a recombinase;
[0105] e. operably fused to a transposase;
[0106] f. operably fused to a epigenetic effector; or
[0107] g. operably fused to any combination of a, b, c, d, e and/or f.

[0108] 39. The method of paragraph 37, further comprising quantifying or characterizing the editing of the target region.

[0109] 40. The method of paragraph 37, wherein the method provides editing efficiency of greater than 10%, 20%, 30%, 40%, 50%, 60%, 70%, 80%, 90%, 95%, 99% relative to SpCas9.

[0110] 41. The method of paragraph 37, further comprising introducing into the host cell a second donor nucleic acid sequence paired with a second guide RNA to modify the second target region of the host cell genome.

[0111] 42. The method of paragraph 37 further comprising introducing into the host cell at least two desired modification sequences for multiplexing.

[0112] 43. The method of paragraph 37 wherein the method comprises insertion or stable integration of the one or more desired modification sequence into the host cell genome.

[0113] 44. The method of paragraph 37 wherein the host cell genome comprises a chromosome or chromosome and plasmid.

[0114] 45. The method of paragraph 37 wherein the target region is modified by an insertion, deletion or alteration of one or more base pairs at the target region in the host cell genome.

[0115] 46. The method of paragraph 37 wherein the one or more desired modification sequence is selected from one or more sequences associated with one or more monogenic disorders or diseases.

[0116] 47. The method of paragraph 37 wherein the host cell is a primary human cell.

[0117] 48. The method of paragraph 37 wherein the step of introducing into the host cell comprises a delivery vector operably linked to the genome editing system.

[0118] 49. The method of paragraph 48 wherein the delivery vector is selected from viral vector is selected from a retroviral vector, a lentiviral vector, an adenoviral, an adeno-associated viral vector, vaccinia viral vector, poxviral vector, and herpes simplex viral vector.

[0119] 50. The method of paragraph 48 wherein the delivery vector comprises a non-viral vectors selected from cationic liposomes, lipid nanoparticles (LNPs), cationic polymers, vesicles, and gold nanoparticles.

[0120] 51. The method of paragraph 37 wherein the editing method results in enhanced editing efficiency and/or low cytotoxicity.

[0121] 52. A gene editing construct comprising:
[0122] (a) an Cas Type V domain; (b) a reverse transcriptase domain; (c) a transcriptional modulating polypeptide; (d) a recombinase domain; (e) a transposose domain; or (f) any combination of a, b, c, d, e, or f.

[0123] 53. The gene editing construct of claim 52, further comprising a donor nucleic acid sequence capable of modifying a target sequence; and

[0124] In various aspects, the target region is modified by an insertion, deletion or alteration of one or more base pairs at the target region in the host cell genome.

[0125] In various embodiments, one or more desired modification sequence is selected from one or more sequences associated with one or more monogenic disorders or diseases.

[0126] In certain preferred embodiments, the methods and compositions provide editing efficiency of greater than 10%, 20%, 30%, 40%, 50%, 60%, 70%, 80%, 90%, 95%, 99% relative to SpCas9.

[0127] Related aspects provide for the use of a Cas Type V-based gene editing system described herein Cas Type Vin the application for plants, yeast, bacteria, and fungi and desired bioindustrial applications for producing value-added components in such systems in a recombinant manner.

[0128] Accordingly, it is an object of the invention not to encompass within the invention any previously known product, process of making the product, or method of using the product such that Applicants reserve the right and hereby disclose a disclaimer of any previously known product, process, or method. It is further noted that the invention does not intend to encompass within the scope of the invention any product, process, or making of the product or method of using the product, which does not meet the written description and enablement requirements of the USPTO (35 U.S.C. § 112, first paragraph) or the EPO (Article 83 of the EPC), such that Applicants reserve the right and hereby disclose a disclaimer of any previously described product, process of making the product, or method of using the product. It may be advantageous in the practice of the invention to be in compliance with Art. 53(c) EPC and Rule 28(b) and (c) EPC. All rights to explicitly disclaim any embodiments that are the subject of any granted patent(s) of applicant in the lineage of this application or in any other lineage or in any prior filed application of any third party is explicitly reserved. Nothing herein is to be construed as a promise.

### DESCRIPTION OF THE DRAWINGS

[0129] FIG. 1A-1C are schemes depicting the predicted stem loop structures of crRNA sequences of the present disclosure corresponding to Group 1 sequences.

[0130] FIG. 2A-2B are schemes depicting the predicted stem loop structures of crRNA sequences of the present disclosure corresponding to Group 2 sequences.

[0131] FIG. 3A-3B are schemes depicting the predicted stem loop structures of crRNA sequences of the present disclosure corresponding to Group 3 sequences.

[0132] FIG. 4A-4B are schemes depicting the predicted stem loop structures of crRNA sequences of the present disclosure corresponding to Group 4 sequences.

[0133] FIG. 5A-5C are schemes depicting the predicted stem loop structures of crRNA sequences of the present disclosure corresponding to Group 5 sequences.

[0134] FIG. 6A-6D are schemes depicting the predicted stem loop structures of crRNA sequences of the present disclosure corresponding to Group 6 sequences.

[0135] FIG. 7A-7C are schemes depicting the predicted stem loop structures of crRNA sequences of the present disclosure corresponding to Group 7 sequences.

[0136] FIG. 8A-8B are schemes depicting the predicted stem loop structures of crRNA sequences of the present disclosure corresponding to Group 8 sequences.

[0137] FIG. 9A-9NN are schemes depicting the predicted stem loop structures of crRNA sequences of the present disclosure corresponding to Group 9 sequences.

[0138] FIG. 10A-10F are schemes depicting the predicted stem loop structures of crRNA sequences of the present disclosure corresponding to Group 10 sequences.

[0139] FIG. 11A-11C are schemes depicting the predicted stem loop structures of crRNA sequences of the present disclosure corresponding to Group 11 sequences.

[0140] FIG. 12A-12B are schemes depicting the predicted stem loop structures of crRNA sequences of the present disclosure corresponding to Group 12 sequences.

[0141] FIG. 13A-13F are schemes depicting the predicted stem loop structures of crRNA sequences of the present disclosure corresponding to Group 13 sequences.

[0142] FIG. 14A-14V are schemes depicting the predicted stem loop structures of crRNA sequences of the present disclosure corresponding to Group 14 sequences.

[0143] FIG. 15A-15F: as described in Example 9, the figure illustrates that determined PAM sequences added at each protein in the phylogenetic tree. Phylogenetic tree generated using Geneious Prime 2022.1.1 implementation of FastTree on Muscle multiple sequence alignment of selected protein sequences. PAM sequence weblogos generated using WebLogo 3 web application from PFMs.

[0144] FIG. 16 Cleavage products of genomic target DNMT1 visualized on 2% agarose gel. Editing efficiency values for LbaCas12a and each ortholog were calculated using ImageJ software, in accordance with Example 10.

[0145] FIG. 17 Cleavage products of genomic target RUNX1 visualized on 2% agarose gel. Editing efficiency values for LbaCas12a and each ortholog were calculated using ImageJ software, in accordance with Example 10.

[0146] FIG. 18 Cleavage products of genomic target SCN1A visualized on 2% agarose gel. Editing efficiency values for LbaCas12a and each ortholog were calculated using ImageJ software, in accordance with Example 10.

[0147] FIG. 19 Cleavage products of genomic target FANCF site 2 visualized on 2% agarose gel. Editing efficiency values for LbaCas12a and each ortholog were calculated using ImageJ software, in accordance with Example 10.

[0148] FIG. 20 Cleavage products of genomic target FANCF site 1 visualized on 2% agarose gel. Editing efficiency values for LbaCas12a and each ortholog were calculated using ImageJ software, in accordance with Example 10.

[0149] FIG. 21 Comparison of Cas12a orthologs activity on different targets (n≥3). Results are calculated from T7 endonuclease assay, in accordance with Example 11.

[0150] FIG. 22A Genome editing efficiency results for ID405, ID414, ID418, LbaCas12a depicted as indels frequency at RUNX1 and SCN1A target sites as determined by deep-sequencing in accordance with Example 12.

[0151] FIG. 22B Genome editing efficiency results for ID405, ID414, ID418, LbaCas12a depicted as indels frequency at RUNX1, SCN1A, DNMT1, FANCF site 1, and FANCF site 2, as determined by deep-sequencing in accordance with Example 12.

[0152] FIG. 23A-23E Top five most common editing outcomes observed in deep sequencing data of ID405, ID414, ID418 and LbaCas12a genomic targets in RUNX1 (FIG. 23A), SCN1A (FIG. 23B), DNMT1 (FIG. 23C), FANCF Site 1 (FIG. 23D), and FANCF Site 2 (FIG. 23E) genes as compared to reference sequences.

[0153] FIG. 24 Genome editing efficiency results depicted as indels frequency as determined by deep-sequencing as described in Example 12.

[0154] FIG. 25 Top 5 most common editing outcomes observed in deep sequencing data of ID428 and ID433 genomic targets exhibiting low but observable editing as compared to reference sequences as described in Example 12.

### DETAILED DESCRIPTION

[0155] The present disclosure provides Cas TypeV-based gene editing systems for use in various applications, including precision gene editing in cells, tissues, organs, or organisms. In various embodiments, the Cas TypeV-based gene editing systems comprise (a) a Cas TypeV polypeptide and (b) a Cas TypeV guide RNA which is capable of associating with a Cas TypeV polypeptide to form a complex such that the complex localizes to a target nucleic acid sequence (e.g., a genomic or plasmid target sequence) and binds thereto. In various embodiments, the Cas TypeV polypeptide has a nuclease activity which results in the cutting of at least one strand of DNA.

[0156] In exemplary embodiments, the Cas TypeV systems and/or components thereof described herein are formulated as part of a lipid nanoparticle (LNP). In some embodiments, a lipid nanoparticle comprises an ionizable lipid, a structural lipid, a PEGylated lipid, and a phospholipid.

[0157] In various embodiments, the Cas12a polypeptide is a polypeptide selected from Table S15A (SEQ ID NO: 334 (No. ID405), SEQ ID NO: 58 (No. ID414), or SEQ ID NO: 564 (No. ID418), SEQ ID NO: 335 (No. ID406), SEQ ID NO: 331 (No. ID411), SEQ ID NO: 20 (No. ID415), and SEQ ID NO: 445 (No. ID419)), or a polypeptide having at least 70%, 75%, 80%, 85%, 90%, 95%, 99%, or 100% sequence identity with a polypeptide from Table S15A (SEQ ID NO: 334 (No. ID405), SEQ ID NO: 58 (No. ID414), or SEQ ID NO: 564 (No. ID418), SEQ ID NO: 335 (No. ID406), SEQ ID NO: 331 (No. ID411), SEQ ID NO: 20 (No. ID415), and SEQ ID NO: 445 (No. ID419)).

[0158] In various embodiments, the Cas Type V polypeptide is encoded by a polynucleotide sequence selected from Table S15B (SEQ ID NO: 365 (No. ID405), SEQ ID NO: 75 (No. ID414), or SEQ ID NO: 565 (No. ID418), SEQ ID NO: 366 (No. ID406), SEQ ID NO: 331 (No. ID411), SEQ ID NO: 30 (No. ID415), or SEQ ID NO: 445 (No. ID419)), or a polynucleotide having at least 70%, 75%, 80%, 85%, 90%, 95%, 99%, or 100% sequence identity with a polypeptide from Table S15B (SEQ ID NO: 365 (No. ID405), SEQ ID NO: 75 (No. ID414), or SEQ ID NO:565 (No. ID418), SEQ ID NO: 366 (No. ID406), SEQ ID NO: 331 (No. ID411), SEQ ID NO: 30 (No. ID415), or SEQ ID NO: 445 (No. ID419)).

[0159] In various embodiments, the Cas Type V guide RNA is selected from any Cas Type V guide sequence disclosed in Table S15C (SEQ ID NO:28-29, 69-71, 355-360, 542-563), or a nucleic acid molecule having at least 70%, 75%, 80%, 85%, 90%, 95%, 99%, or 100% sequence identity with a Cas Type V guide sequence of Table S15C (SEQ ID NO:28-29, 69-71, 355-360, 542-563).

[0160] In various embodiments, the Cas Type V guide RNA may comprise (a) a portion that binds or associates with a Cas Type V polypeptide and (b) a region that comprises a targeting sequence, i.e., a sequence which is complementary to target nucleic acid sequence. For Cas Type V guide RNA designs, just like for Cas9 guide RNA, the target sequence is typically next to a PAM sequence. But for Cas Type V, the PAM sequence in various embodiments is typically TTTV, where V typically represents A, C, or G. In various embodiments, the “V” of the TTTV is immediately adjacent to the most 5′ base of the non-targeted strand side of the protospacer element. As for Cas9 guide RNA designs, the PAM sequence is typically not included in the guide RNA design.

[0161] In various embodiments, the guide RNA for Cas Type V is relatively short at only approximately 40-44 bases long. The part that base pairs to the protospacer in the target sequence is 20-24 bases in length, and there is also a constant about 20-base section that binds to Cas Type V.

[0162] In various embodiments, nomenclature for a Cas Type V guide RNA is referred to as a “crRNA” and there is no Cas9-like “tracrRNA” component.

[0163] In other aspects, the Cas Type V-based gene editing systems may comprise one or more additional accessory proteins having genome modifying functions, including recombinases, invertases, nucleases, polymerases, ligases, deaminases, reverse transcriptases, or epigenetic modifying functions. In various embodiments, the accessory proteins may be provided separately. In other embodiments, the accessory proteins may be fused to Cas Type V, optionally with a linker.

[0164] In still another aspect, the disclosure provides delivery systems for introducing the Cas Type V-based gene editing systems or components thereof into cells, tissues, organs, or organisms. Depending on the chosen format, the Cas Type V-based gene editing systems and/or the individual or combined components thereof may be delivered as DNA molecules (e.g., encoded on one or more plasmids), RNA molecules (e.g., guide RNAs for targeting the Cas Type V protein or linear or circular mRNAs coding for the Cas Type V protein or accessory protein components of the Cas Type V-based gene editing systems), proteins (e.g., Cas Type V polypeptides, accessory proteins having other functions (e.g., recombinases, nucleases, polymerases, ligases, deaminases, or reverse transcriptases), or protein-nucleic acid complexes (e.g., complexes between a guide RNA and a Cas Type V protein or fusion protein comprising a Cas Type V protein).

[0165] In another aspect, the present disclosure provides nucleic acid molecules encoding the Cas Type V-based gene editing systems or components thereof. In yet another aspect, the disclosure provides vectors for transferring and/or expressing said Cas Type V-based gene editing systems, e.g., under in vitro, ex vivo, and in vivo conditions. In still another aspect, the disclosure provides cell-delivery compositions and methods, including compositions for passive and/or active transport to cells (e.g., plasmids), delivery by virus-based recombinant vectors (e.g., AAV and/or lentivirus vectors), delivery by non-virus-based systems (e.g., liposomes and LNPs), and delivery by virus-like particles of the Cas Type V-based gene editing systems described herein. Depending on the delivery system employed, the Cas Type V-based gene editing systems described herein may be delivered in the form of DNA (e.g., plasmids or DNA-based virus vectors), RNA (e.g., guide RNA and mRNA delivered by LNPs), a mixture of DNA and RNA, protein (e.g., virus-like particles), and ribonucleoprotein (RNP) complexes. Any suitable combinations of approaches for delivering the components of the herein disclosed Cas Type V-based gene editing systems may be employed.

[0166] In other embodiments, the Cas Type V-based gene editing systems may comprise a template DNA comprising an edit, e.g., a single strand or double strand donor molecule (linear or circular) which may be used by the cell to repair a single or double cut lesion introduced by a Cas Type V-based gene editing systems by way of cellular repair processes, including homology-dependent repair (HDR) (e.g., in dividing cells) or non-homologous end joining (NHEJ) (in non-dividing cells).

[0167] In one embodiment, each of the components of the Cas Type V-based gene editing systems is delivered by an all-RNA system, e.g., the delivery of one or more RNA molecules (e.g., mRNA and/or guide RNA) by one or more LNPs, wherein the one or more RNA molecules form the guide RNA and/or are translated into the polypeptide components (e.g., the Cas Type V polypeptides and/or any accessory proteins), and a DNA or RNA-encoded template DNA molecule (e.g., donor template), as appropriate or desired.

[0168] In yet another aspect, the disclosure provides methods for genome editing by introducing a Cas Type V-based gene editing system described herein into a cell (e.g., under in vitro, in vivo, or ex vivo conditions) comprising a target edit site, thereby resulting in an edit at the target edit. In other aspects, the disclosure provides formulations comprising any of the aforementioned components for delivery to cells and/or tissues, including in vitro, in vivo, and ex vivo delivery, recombinant cells and/or tissues modified by the recombinant Cas Type V-based gene editing systems and methods described herein, and methods of modifying cells by conducting genome editing using the herein disclosed Cas Type V-based gene editing systems.

[0169] The disclosure also provides methods of making the Cas Type V-based gene editing systems, their protein and nucleic acid molecule components, vectors, compositions and formulations described herein, as well as to pharmaceutical compositions and kits for modifying cells under in vitro, in vivo, and ex vivo conditions that comprise the herein disclosed genome editing and/or modification systems.

### A. General Definitions

[0170] Unless otherwise defined, all terms of art, notations and other scientific terminology used herein are intended to have the meanings commonly understood by those of skill in the art to which this disclosure pertains. In some cases, terms with commonly understood meanings are defined herein for clarity and/or for ready reference, and the inclusion of such definitions herein should not necessarily be construed to represent a difference over what is generally understood in the art. The techniques and procedures described or referenced herein are generally well understood and commonly employed using conventional methodologies by those skilled in the art, such as, for example, the widely utilized molecular cloning methodologies described in Sambrook et al., Molecular Cloning: A Laboratory Manual 4th ed. (2012) Cold Spring Harbor Laboratory Press, Cold Spring Harbor, NY. As appropriate, procedures involving the use of commercially available kits and reagents are generally carried out in accordance with manufacturer-defined protocols and conditions unless otherwise noted.

### An

[0171] The articles “a” and “an” are used herein to refer to one or to more than one (i.e., to at least one) of the grammatical object of the article. By way of example, “an element” means one element or more than one element.

### About

[0172] “About” as used herein when referring to a measurable value such as an amount, a temporal duration, and the like, is meant to encompass variations of ±10%, as such variations are appropriate to perform the disclosed methods.

### Biologically Active

[0173] As used herein, the term “biologically active” refers to a characteristic of an agent (e.g., DNA, RNA, or protein) that has activity in a biological system (including in vitro and in vivo biological system), and particularly in a living organism, such as in a mammal, including human and non-human mammals. For instance, an agent when administered to an organism has a biological effect on that organism, is considered to be biologically active.

### Bulge

[0174] As used herein, the term “bulge” refers to a small region of unpaired base(s) that interrupts a “stem” of base-paired nucleotides. The bulge may comprise one or two single-stranded or unbase-paired nucleotides joined at both ends by base-paired nucleotides of the stem. The bulge can be symmetrical (viz., the two unbase-paired single-stranded regions have the same number of nucleotides), or asymmetrical (viz., the unbase-paired single stranded region(s) have different or unequal numbers of nucleotides), or there is only one unbase-paired nucleotide on one strand. A bulge can be described as A/B (such as a “2/2 bulge,” or a “I/O bulge”) wherein A represents the number of unpaired nucleotides on the upstream strand of the stem, and B represents the number of unpaired nucleotides on the downstream strand of the stem. An upstream strand of a bulge is more 5′ to a downstream strand of the bulge in the primary nucleotide sequence.

### Cas12a or Cas12a Polypeptide

[0175] As used herein, the “Cas12a polypeptide”, “Cas12a protein” or “Cas12a nuclease” refers to a RNA-binding site-directed CRISPR Cas TypeV polypeptide that recognizes and/or binds RNA and is targeted to a specific DNA sequence. An Cas12a system as described herein refers to a specific DNA sequence by the RNA molecule to which the Cas12a polypeptide or Cas12a protein is bound. The RNA molecule comprises a sequence that binds, hybridizes to, or is complementary to a target sequence within the targeted polynucleotide sequence, thus targeting the bound polypeptide to a specific location within the targeted polynucleotide sequence (the target sequence). “Cas12a” is a type of CRISPR Class II Type V nuclease. The specification may describe the polypeptides contemplated in the scope of this application as Cas12a polypeptides or alternatively as Cas TypeV polypeptides, or the like.

cDNA

[0176] As used herein, the term “cDNA” refers to a strand of DNA copied from an RNA template, e.g., by a reverse transcriptase.

### Cleavage

[0177] As used herein, the term “cleavage” refers to the breakage of the covalent backbone of a DNA molecule. Cleavage can be initiated by a variety of methods including, but not limited to, enzymatic or chemical hydrolysis of a phosphodiester bond. Both single-stranded cleavage and double-stranded cleavage are possible, and double-stranded cleavage can occur as a result of two distinct single-stranded cleavage events. DNA cleavage can result in the production of either blunt ends or staggered ends.

### Cognate

[0178] The term “cognate” refers to two biomolecules that normally interact or co-exist in nature.

### Complementary

[0179] As used herein, the terms “complementary” or “substantially complementary” are meant to refer to a nucleic acid (e.g., RNA, DNA) that comprises a sequence of nucleotides that enables it to non-covalently bind, i.e., form Watson-Crick base pairs and/or G/U base pairs, “anneal”, or “hybridize,” to another nucleic acid in a sequence-specific, antiparallel, manner (i.e., a nucleic acid specifically binds to a complementary nucleic acid) under the appropriate in vitro and/or in vivo conditions of temperature and solution ionic strength. Standard Watson-Crick base-pairing includes: adenine (A) pairing with thymidine (T), adenine (A) pairing with uracil (U), and guanine (G) pairing with cytosine (C) [DNA, RNA]. In addition, for hybridization between two RNA molecules (e.g., dsRNA), and for hybridization of a DNA molecule with an RNA molecule (e.g., when a DNA target nucleic acid base pairs with a guide RNA, etc.): guanine (G) can also base pair with uracil (U). For example, G/U base-pairing is at least partially responsible for the degeneracy (i.e., redundancy) of the genetic code in the context of tRNA anti-codon base-pairing with codons in mRNA. Thus, in the context of this disclosure, a guanine (G) is considered complementary to both a uracil (U) and to an adenine (A). For example, when a G/U base-pair can be made at a given nucleotide position of a dsRNA duplex of a guide RNA molecule, the position is not considered to be non-complementary, but is instead considered to be complementary.

[0180] It is understood that the sequence of a polynucleotide need not be 100% complementary to that of its target nucleic acid to be specifically hybridizable or hybridizable. Moreover, a polynucleotide may hybridize over one or more segments such that intervening or adjacent segments are not involved in the hybridization event (e.g., a bulge, a loop structure or hairpin structure, etc.). A polynucleotide can comprise 60% or more, 65% or more, 70% or more, 75% or more, 80% or more, 85% or more, 90% or more, 95% or more, 98% or more, 99% or more, 99.5% or more, or 100% sequence complementarity to a target region within the target nucleic acid sequence to which it will hybridize. For example, an antisense nucleic acid in which 18 of 20 nucleotides of the antisense compound are complementary to a target region, and would therefore specifically hybridize, would represent 90 percent complementarity. In this example, the remaining noncomplementary nucleotides may be clustered or interspersed with complementary nucleotides and need not be contiguous to each other or to complementary nucleotides. Percent complementarity between particular stretches of nucleic acid sequences within nucleic acids can be determined using any convenient method. Example methods include BLAST programs (basic local alignment search tools) and PowerBLAST programs (Altschul et al., J. Mol. Biol., 1990, 215, 403-410; Zhang and Madden, Genome Res., 1997, 7, 649-656), the Gap program (Wisconsin Sequence Analysis Package, Version 8 for Unix, Genetics Computer Group, University Research Park, Madison Wis.), e.g., using default settings, which uses the algorithm of Smith and Waterman (Adv. Appl. Math., 1981, 2, 482-489), and the like. Consisting essentially of

### Consisting Essentially of

[0181] The phrase “consisting essentially of” is meant herein to exclude anything that is not the specified active component or components of a system, or that is not the specified active portion or portions of a molecule.

### Control Sequences

[0182] The term “control sequences” is intended to include, at a minimum, all components whose presence is essential for expression, and can also include additional components whose presence is advantageous, for example, leader sequences and fusion partner sequences. Suitable expression vectors include, without limitation, plasmids and viral vectors derived from, for example, bacteriophage, baculoviruses, tobacco mosaic virus, herpes viruses, cytomegalovirus, retroviruses, vaccinia viruses, adenoviruses, and adeno-associated viruses. Numerous vectors and expression systems are commercially available, such as from Novagen (Madison, WI), Clontech (Palo Alto, CA), Stratagene (La Jolla, CA), and Invitrogen/Life Technologies (Carlsbad, CA). The present invention comprehends recombinant vectors that may include viral vectors, bacterial vectors, protozoan vectors, DNA vectors, or recombinants thereof.

### Degenerate Variant

[0183] As used herein, the phrase “degenerate variant” of a reference nucleic acid sequence encompasses nucleic acid sequences that can be translated, according to the standard genetic code, to provide an amino acid sequence identical to that translated from the reference nucleic acid sequence. The term “degenerate oligonucleotide” or “degenerate primer” is used to signify an oligonucleotide capable of hybridizing with target nucleic acid sequences that are not necessarily identical in sequence but that are homologous to one another within one or more particular segments.

[0184] Engineered nucleic acid constructs of the present disclosure may be encoded by a single molecule (e.g., encoded by or present on the same plasmid or other suitable vector) or by multiple different molecules (e.g., multiple independently-replicating vectors).

### DNA-Guided Nuclease

[0185] As used herein, an “DNA-guided nuclease” is a type of “programmable nuclease,” and a specific type of “nucleic acid-guided nuclease.” An example of a DNA-guided nuclease is reported in Varshney et al., DNA-guided genome editing using structure-guided endonucleases, Genome Biology, 2016, 17(1), 187, which may be used in the context of the present disclosure and is incorporated herein by reference. As used herein, the term “DNA-guided nuclease” or “DNA-guided endonuclease” refers to a nuclease that associates covalently or non-covalently with a guide RNA thereby forming a complex between the guide RNA and the DNA-guided nuclease. The guide RNA comprises a spacer sequence which comprises a nucleotide sequence having complementarity with a strand of a target DNA sequence. Thus, the DNA-guided nuclease is indirectly guided or programmed to localize to a specific site in a DNA molecule through its association with the guide RNA, which directly binds or anneals to a strand of the target DNA through its complementarity region via Watson-Crick base-pairing.

### DNA Regulatory Sequences

[0186] As used herein, the terms “DNA regulatory sequences,” “control elements,” and “regulatory elements,” can be used interchangeably herein to refer to transcriptional and translational control sequences, such as promoters, enhancers, polyadenylation signals, terminators, protein degradation signals, and the like, that provide for and/or regulate transcription of a non-coding sequence (e.g., guide RNA) or a coding sequence and/or regulate translation of a mRNA into an encoded polypeptide.

### Domain

[0187] The term “domain” as used herein refers to a structure of a biomolecule that contributes to a known or suspected function of the biomolecule. Domains may be co-extensive with regions or portions thereof; domains may also include distinct, non-contiguous regions of a biomolecule. Examples of protein domains include, but are not limited to, an Ig domain, an extracellular domain, a transmembrane domain, and a cytoplasmic domain. [0062] As used herein, the term “molecule” means any compound, including, but not limited to, a small molecule, peptide, protein, sugar, nucleotide, nucleic acid, lipid, etc., and such a compound can be natural or synthetic.

### Donor Nucleic Acid

[0188] By a “donor nucleic acid” or “donor polynucleotide” or “donor DNA” or “HDR donor DNA” it is meant a single-stranded DNA to be inserted at a site cleaved by a programmable nuclease (e.g., a CRISPR/Cas effector protein; a TALEN; a ZFN; a meganuclease) (e.g., after dsDNA cleavage, after nicking a target DNA, after dual nicking a target DNA, and the like). The donor polynucleotide can contain sufficient homology to a genomic sequence at the target site, e.g. 70%, 80%, 85%, 90%, 95%, or 100% homology with the nucleotide sequences flanking the target site, e.g., within about 200 bases or less of the target site, e.g., within about 190 bases or less of the target site, e.g., within about 180 bases or less of the target site, e.g., within about 170 bases or less of the target site, e.g., within about 160 bases or less of the target site, e.g., within about 150 bases or less of the target site, e.g., within about 140 bases or less of the target site, e.g., within about 130 bases or less of the target site, e.g., within about 120 bases or less of the target site, e.g., within about 110 bases or less of the target site, e.g., within about 100 bases or less of the target site, e.g., within about 90 bases or less of the target site, e.g., within about 80 bases or less of the target site, e.g., within about 70 bases or less of the target site, e.g., within about 60 bases or less of the target site, e.g., 50 bases or less of the target site, e.g., within about 30 bases, within about 15 bases, within about 10 bases, within about 5 bases, or immediately flanking the target site, to support homology-directed repair between it and the genomic sequence to which it bears homology.

### Effective Amount

[0189] An “effective amount” as used herein, means an amount which provides a therapeutic or prophylactic benefit under the conditions of administration.

### Encapsulation Efficiency

[0190] As used herein, “encapsulation efficiency” refers to the amount of a therapeutic and/or prophylactic that becomes part of a nanoparticle composition, relative to the initial total amount of therapeutic and/or prophylactic used in the preparation of a nanoparticle composition. For example, if 97 mg of a polynucleotide are encapsulated in a nanoparticle composition out of a total 100 mg of therapeutic and/or prophylactic initially provided to the composition, the encapsulation efficiency may be given as 97%. As used herein, “encapsulation” may refer to complete, substantial, or partial enclosure, confinement, surrounding, or encasement.

### Encodes

[0191] As used herein, a DNA sequence that “encodes” a particular RNA is a DNA nucleotide sequence that is transcribed into RNA. A DNA polynucleotide may encode an RNA (mRNA) that is translated into protein (and therefore the DNA and the mRNA both encode the protein), or a DNA polynucleotide may encode an RNA that is not translated into protein (e.g. tRNA, rRNA, microRNA (miRNA), a “non-coding” RNA (ncRNA), a guide RNA, etc.).

### Exosomes

[0192] As used herein, the term “exosomes” refer to small membrane bound vesicles with an endocytic origin. Without wishing to be bound by theory, exosomes are generally released into an extracellular environment from host/progenitor cells post fusion of multivesicular bodies the cellular plasma membrane. As such, exosomes can include components of the progenitor membrane in addition to designed components. Exosome membranes are generally lamellar, composed of a bilayer of lipids, with an aqueous inter-nanoparticle space.

### Expression Vector

[0193] As used herein, the term “expression vector” or “expression construct” refers to a vector that includes one or more expression control sequences, and an “expression control sequence” is a DNA sequence that controls and regulates the transcription and/or translation of another DNA sequence. Expression control sequences are sequences which control the transcription, post-transcriptional events and translation of nucleic acid sequences.

[0194] Expression control sequences include appropriate transcription initiation, termination, promoter and enhancer sequences; efficient RNA processing signals such as splicing and polyadenylation signals; sequences that stabilize cytoplasmic mRNA; sequences that enhance translation efficiency (e.g., ribosome binding sites); sequences that enhance protein stability; and when desired, sequences that enhance protein secretion. The nature of such control sequences differs depending upon the host organism; in prokaryotes, such control sequences generally include promoter, ribosomal binding site, and transcription termination sequence.

### Fusion Protein

[0195] The term “fusion protein” refers to a polypeptide comprising a polypeptide or fragment coupled to heterologous amino acid sequences optionally via an amino acid linker. Fusion proteins are useful because they can be constructed to contain two or more desired functional elements from two or more different proteins. A fusion protein comprises at least 10 contiguous amino acids from a polypeptide of interest, more preferably at least 20 or 30 amino acids, even more preferably at least 40, 50 or 60 amino acids, yet more preferably at least 75, 100 or 125 amino acids.

[0196] Fusions that include the entirety of the proteins of the present invention have particular utility. The heterologous polypeptide included within the fusion protein of the present invention is at least 6 amino acids in length, often at least 8 amino acids in length, and usefully at least 15, 20, and 25 amino acids in length. Fusions that include larger polypeptides, such as an IgG Fc region, and even entire proteins, such as the green fluorescent protein (“GFP”) chromophore-containing proteins, have particular utility. Fusion proteins can be produced recombinantly by constructing a nucleic acid sequence which encodes the polypeptide or a fragment thereof in frame with a nucleic acid sequence encoding a different protein or peptide and then expressing the fusion protein. Alternatively, a fusion protein can be produced chemically by crosslinking the polypeptide or a fragment thereof to another protein.

### Guide RNA

[0197] The RNA molecule that binds to the Cas12a polypeptide and targets the polypeptide to a specific location within the targeted polynucleotide sequence is referred to herein as the “guide RNA” or “guide RNA polynucleotide” (also referred to herein as a “guide RNA” or “gRNA” or “crRNA”). A guide RNA comprises two segments, a “DNA-targeting segment” and a “protein-binding segment.” By “segment” it is meant a segment/section/region of a molecule, e.g., a contiguous stretch of nucleotides in an RNA. As an illustrative, non-limiting example, a protein-binding segment of a guide RNA can comprise base pairs 5-20 of the RNA molecule that is 40 base pairs in length; and the DNA-targeting segment can comprise base pairs 21-40 of the RNA molecule that is 40 base pairs in length. The definition of “segment,” unless otherwise specifically defined in a particular context, is not limited to a specific number of total base pairs, is not limited to any particular number of base pairs from a given RNA molecule, is not limited to a particular number of separate molecules within a complex, and may include regions of RNA molecules that are of any total length and may or may not include regions with complementarity to other molecules.

[0198] The DNA-targeting segment (or “DNA-targeting sequence”) comprises a nucleotide sequence that is complementary to a specific sequence within a targeted polynucleotide sequence (the complementary strand of the targeted polynucleotide sequence) designated the “protospacer-like” sequence herein. The protein-binding segment (or “protein-binding sequence”) interacts with a site-directed modifying polypeptide. When the site-directed modifying polypeptide is an Cas12a polypeptide, site-specific cleavage of the targeted polynucleotide sequence may occur at locations determined by both (i) base-pairing complementarity between the guide RNA and the targeted polynucleotide sequence; and (ii) a short motif (referred to as the protospacer adjacent motif (PAM)) in the targeted polynucleotide sequence.

### Heterologous Nucleic Acid

[0199] As used herein, the term “heterologous nucleic acid” refers to a genotypically distinct entity from that of the rest of the entity to which it is compared or into which it is introduced or incorporated. For example, a polynucleotide introduced by genetic engineering techniques into a different cell type is a heterologous polynucleotide (e.g., DNA or RNA) and, if expressed, can encode a heterologous polypeptide. Similarly, a cellular sequence (e.g., a gene or portion thereof) that is incorporated into a viral vector is a heterologous nucleotide sequence with respect to the vector.

### Homology

[0200] A protein has “homology” or is “homologous” to a second protein if the nucleic acid sequence that encodes the protein has a similar sequence to the nucleic acid sequence that encodes the second protein. Alternatively, a protein has homology to a second protein if the two proteins have “similar” amino acid sequences. (Thus, the term “homologous proteins” is defined to mean that the two proteins have similar amino acid sequences.) As used herein, homology between two regions of amino acid sequence (especially with respect to predicted structural similarities) is interpreted as implying similarity in function.

[0201] Sequence homology for polypeptides, which is also referred to as percent sequence identity, is typically measured using sequence analysis software. See, e.g., the Sequence Analysis Software Package of the Genetics Computer Group (GCG), University of Wisconsin Biotechnology Center, 910 University Avenue, Madison, Wis. 53705. Protein analysis software matches similar sequences using a measure of homology assigned to various substitutions, deletions and other modifications, including conservative amino acid substitutions. For instance, GCG contains programs such as “Gap” and “Bestfit” which can be used with default parameters to determine sequence homology or sequence identity between closely related polypeptides, such as homologous polypeptides from different species of organisms or between a wild-type protein and a mutein thereof. See, e.g., GCG Version 6.1.

[0202] A preferred algorithm when comparing a particular polypeptide sequence to a database containing a large number of sequences from different organisms is the computer program BLAST (Altschul et al., J. Mol. Biol. 215:403-410 (1990); Gish and States, Nature Genet. 3:266-272 (1993); Madden et al., Meth. Enzymol. 266:131-141 (1996); Altschul et al., Nucleic Acids Res. 25:3389-3402 (1997); Zhang and Madden, Genome Res. 7:649-656 (1997)), especially blastp or tblastn (Altschul et al., Nucleic Acids Res. 25:3389-3402 (1997)). Preferred parameters for BLASTp are: Expectation value: 10 (default); Filter: seg (default); Cost to open a gap: 11 (default); Cost to extend a gap: 1 (default); Max. alignments: 100 (default); Word size: 11 (default); No. of descriptions: 100 (default); Penalty Matrix: BLOWSUM62.

[0203] The length of polypeptide sequences compared for homology will generally be at least about 16 amino acid residues, usually at least about 20 residues, more usually at least about 24 residues, typically at least about 28 residues, and preferably more than about 35 residues. When searching a database containing sequences from a large number of different organisms, it is preferable to compare amino acid sequences. Database searching using amino acid sequences can be measured by algorithms other than blastp known in the art. For instance, polypeptide sequences can be compared using FASTA, a program in GCG Version 6.1.

[0204] FASTA provides alignments and percent sequence identity of the regions of the best overlap between the query and search sequences. Pearson, Methods Enzymol. 183:63-98 (1990) (incorporated by reference herein). For example, percent sequence identity between amino acid sequences can be determined using FASTA with its default parameters (a word size of 2 and the PAM250 scoring matrix), as provided in GCG Version 6.1, herein incorporated by reference.

### Homology-Directed Repair

[0205] As used herein, “homology-directed repair (HDR)” refers to the specialized form DNA repair that takes place, for example, during repair of double-strand breaks in cells. This process requires nucleotide sequence homology, uses a “donor” molecule to template repair of a “target” molecule (i.e., the one that experienced the double-strand break), and leads to the transfer of genetic information from the donor to the target. Homology-directed repair may result in an alteration of the sequence of the target molecule (e.g., insertion, deletion, mutation), if the donor polynucleotide differs from the target molecule and part or all of the sequence of the donor polynucleotide is incorporated into the targeted polynucleotide sequence.

### Identical

[0206] As used herein, the term “identical” refers to two or more sequences or subsequences which are the same. In addition, the term “substantially identical,” as used herein, refers to two or more sequences which have a percentage of sequential units which are the same when compared and aligned for maximum correspondence over a comparison window, or designated region as measured using a comparison algorithm or by manual alignment and visual inspection. By way of example only, two or more sequences may be “substantially identical” if the sequential units are about 60% identical, about 65% identical, about 70% identical, about 75% identical, about 80% identical, about 85% identical, about 90% identical, or about 95% identical over a specified region. Such percentages to describe the “percent identity” of two or more sequences. The identity of a sequence can exist over a region that is at least about 75-100 sequential units in length, over a region that is about 50 sequential units in length, or, where not specified, across the entire sequence. This definition also refers to the complement of a test sequence.

[0207] Alternatively, substantially identical or similarity exists when a nucleic acid or fragment thereof hybridizes to another nucleic acid, to a strand of another nucleic acid, or to the complementary strand thereof, under stringent hybridization conditions. “Stringent hybridization conditions” and “stringent wash conditions” in the context of nucleic acid hybridization experiments depend upon a number of different physical parameters. Nucleic acid hybridization will be affected by such conditions as salt concentration, temperature, solvents, the base composition of the hybridizing species, length of the complementary regions, and the number of nucleotide base mismatches between the hybridizing nucleic acids, as will be readily appreciated by those skilled in the art. One having ordinary skill in the art knows how to vary these parameters to achieve a particular stringency of hybridization.

### Isolated

[0208] “Isolated” means altered or removed from the natural state. For example, a nucleic acid or a peptide naturally present in a living animal is not “isolated,” but the same nucleic acid or peptide partially or completely separated from the coexisting materials of its natural state is “isolated.” An isolated nucleic acid or protein can exist in substantially purified form, or can exist in a non-native environment such as, for example, a host cell. An “isolated nucleic acid” refers to a nucleic acid segment or fragment, which has been separated from sequences which flank it in a naturally occurring state, i.e., a DNA fragment, which has been removed from the sequences which are normally adjacent to the fragment, i.e., the sequences adjacent to the fragment in a genome in which it naturally occurs. The term also applies to nucleic acids which have been substantially purified from other components, which naturally accompany the nucleic acid, i.e., RNA or DNA or proteins, which naturally accompany it in the cell. The term therefore includes, for example, a recombinant DNA or RNA, which is incorporated into a vector, into an autonomously replicating plasmid or virus, or into the genomic DNA or RNA of a prokaryote or eukaryote, or which exists as a separate molecule (i.e., as a cDNA or a genomic or cDNA fragment produced by PCR or restriction enzyme digestion) independent of other sequences. It also includes a recombinant DNA or RNA, which is part of a hybrid gene encoding additional polypeptide sequence.

### Isolated Protein

[0209] The term “isolated protein” or “isolated polypeptide” is a protein or polypeptide that by virtue of its origin or source of derivation (1) is not associated with naturally associated components that accompany it in its native state, (2) exists in a purity not found in nature, where purity can be adjudged with respect to the presence of other cellular material (e.g., is free of other proteins from the same species) (3) is expressed by a cell from a different species, or (4) does not occur in nature (e.g., it is a fragment of a polypeptide found in nature or it includes amino acid analogs or derivatives not found in nature or linkages other than standard peptide bonds). Thus, a polypeptide that is chemically synthesized or synthesized in a cellular system different from the cell from which it naturally originates will be “isolated” from its naturally associated components. A polypeptide or protein may also be rendered substantially free of naturally associated components by isolation, using protein purification techniques well known in the art. As thus defined, “isolated” does not necessarily require that the protein, polypeptide, peptide or oligopeptide so described has been physically removed from its native environment.

### Lipid Nanoparticle (LNP)

[0210] As used herein, the term “lipid nanoparticle” or LNP refers to a type of lipid particle delivery system formed of small solid or semi-solid particles possessing an exterior lipid layer with a hydrophilic exterior surface that is exposed to the non-LNP environment, an interior space which may aqueous (vesicle like) or non-aqueous (micelle like), and at least one hydrophobic inter-membrane space. LNP membranes may be lamellar or non-lamellar and may be comprised of 1, 2, 3, 4, 5 or more layers. In some embodiments, LNPs may comprise a nucleic acid (e.g. Cas12a editing system) into their interior space, into the inter membrane space, onto their exterior surface, or any combination thereof. In some embodiments, an LNP of the present disclosure comprises an ionizable lipid, a structural lipid, a PEGylated lipid (aka PEG lipid), and a phospholipid. In alternative embodiments, an LNP comprises an ionizable lipid, a structural lipid, a PEGylated lipid (aka PEG lipid), and a zwitterionic amino acid lipid.

[0211] Further discuss of liposomes can be found, for example, in Tenchov et al., “Lipid Nanoparticles—From Liposomes to mRNA Vaccine Delivery, a Landscape of Diversity and Advancement,” ACS Nano, 2021, 15, pp. 16982-17015 (the contents of which are incorporated by reference).

### Linker

[0212] As used herein, the term “linker” refers to a molecule linking or joining two other molecules or moieties. The linker can be an amino acid sequence in the case of a linker joining two fusion proteins. For example, an RNA-guided nuclease (e.g., Cas12a) can be fused to a reverse transcriptase or deaminase by an amino acid linker sequence. The linker can also be a nucleotide sequence in the case of joining two nucleotide sequences together. For example, in the instant case, a guide RNA at its 5′ and/or 3′ ends may be linked by a nucleotide sequence linker to one or more nucleotide sequences (e.g., a RT template in the case of a prime editor guide RNA). In other embodiments, the linker is an organic molecule, group, polymer, or chemical moiety. In some embodiments, the linker is 5-100 amino acids in length, for example, 5, 6, 7, 8, 9, 10, 11, 12, 13, 14, 15, 16, 17, 18, 19, 20, 21, 22, 23, 24, 25, 26, 27, 28, 29, 30, 30-35-40, 40-45, 45-50, 50-60, 60-70, 70-80, 80-90, 90-100, 100-150, or 150-200 amino acids in length. Longer or shorter linkers are also contemplated.

### Liposomes

[0213] As used herein, the term “liposomes” refer to small vesicles that contain at least one lipid bilayer membrane surrounding an aqueous inner-nanoparticle space that is generally not derived from a progenitor/host cell.

### Micelles

[0214] As used herein, the term “micelles” refer to small particles which do not have an aqueous intra-particle space.

### Modified Derivative

[0215] A “modified derivative” refers to polypeptides or fragments thereof that are substantially homologous in primary structural sequence but which include, e.g., in vivo or in vitro chemical and biochemical modifications or which incorporate amino acids that are not found in the native polypeptide. Such modifications include, for example, acetylation, carboxylation, phosphorylation, glycosylation, ubiquitination, labeling, e.g., with radionuclides, and various enzymatic modifications, as will be readily appreciated by those skilled in the art. A variety of methods for labeling polypeptides and of substituents or labels useful for such purposes are well known in the art, and include radioactive isotopes such as ¹²⁵I, ³²P, ³⁵S, and ³H, ligands which bind to labeled antiligands (e.g., antibodies), fluorophores, chemiluminescent agents, enzymes, and antiligands which can serve as specific binding pair members for a labeled ligand. The choice of label depends on the sensitivity required, ease of conjugation with the primer, stability requirements, and available instrumentation. Methods for labeling polypeptides are well known in the art. See, e.g., Ausubel et al., Current Protocols in Molecular Biology, Greene Publishing Associates (1992, and Supplements to 2002) (hereby incorporated by reference).

### Modulating

[0216] By the term “modulating,” as used herein, is meant mediating a detectable increase or decrease in the level of a response in a subject compared with the level of a response in the subject in the absence of a treatment or compound, and/or compared with the level of a response in an otherwise identical but untreated subject. The term encompasses perturbing and/or affecting a native signal or response thereby mediating a beneficial therapeutic response in a subject, preferably, a human.

### Mutated

[0217] The term “mutated” when applied to nucleic acid sequences means that nucleotides in a nucleic acid sequence may be inserted, deleted or changed compared to a reference nucleic acid sequence. A single alteration may be made at a locus (a point mutation) or multiple nucleotides may be inserted, deleted or changed at a single locus. In addition, one or more alterations may be made at any number of loci within a nucleic acid sequence. A nucleic acid sequence may be mutated by any method known in the art including but not limited to mutagenesis techniques such as “error-prone PCR” (a process for performing PCR under conditions where the copying fidelity of the DNA polymerase is low, such that a high rate of point mutations is obtained along the entire length of the PCR product; see, e.g., Leung et al., Technique, 1:11-15 (1989) and Caldwell and Joyce, PCR Methods Applic. 2:28-33 (1992)); and “oligonucleotide-directed mutagenesis” (a process which enables the generation of site-specific mutations in any cloned DNA segment of interest; see, e.g., Reidhaar-Olson and Sauer, Science 241:53-57 (1988)).

### Nanoparticle

[0218] As used herein, the term “nanoparticle” refers to any particle ranging in size from 10-1,000 nm.

### Non-Homologous End Joining

[0219] As used herein, “non-homologous end joining (NHEJ)” refers to the repair of double-strand breaks in DNA by direct ligation of the break ends to one another without the need for a homologous template (in contrast to homology-directed repair, which requires a homologous sequence to guide repair). NHEJ often results in the loss (deletion) of nucleotide sequence near the site of the double-strand break.

### Non-Peptide Analog

[0220] The term “non-peptide analog” refers to a compound with properties that are analogous to those of a reference polypeptide. A non-peptide compound may also be termed a “peptide mimetic” or a “peptidomimetic.” See, e.g., Jones, Amino Acid and Peptide Synthesis, Oxford University Press (1992); Jung, Combinatorial Peptide and Nonpeptide Libraries: A Handbook, John Wiley (1997); Bodanszky et al., Peptide Chemistry—A Practical Textbook, Springer Verlag (1993); Synthetic Peptides: A Users Guide, (Grant, ed., W. H. Freeman and Co., 1992); Evans et al., J. Med. Chem. 30:1229 (1987); Fauchere, J. Adv. Drug Res. 15:29 (1986); Veber and Freidinger, Trends Neurosci., 8:392-396 (1985); and references sited in each of the above, which are incorporated herein by reference. Such compounds are often developed with the aid of computerized molecular modeling. Peptide mimetics that are structurally similar to useful peptides of the present invention may be used to produce an equivalent effect and are therefore envisioned to be part of the present invention.

### Nuclear Localization Sequence (NLS)

[0221] As used herein, the term“nuclear localization sequence” or“NLS” refers to an amino acid sequence that promotes import of a protein (e.g., a RNA-guided nuclease) into the cell nucleus, for example, by nuclear transport. Nuclear localization sequences are known in the art. For example, NLS sequences are described in Plank et al., international PCT application, PCT/EP2000/011690, filed Nov. 23, 2000, published as WO/2001/038547 on May 31, 2001, the contents of which are incorporated herein by reference for its disclosure of exemplary nuclear localization sequences.

### Nucleic Acid

[0222] As used herein, the term “nucleic acid” or “nucleic acid molecule” or “nucleic acid sequence” or “polynucleotide” generally refer to deoxyribonucleic or ribonucleic oligonucleotides in either single- or double-stranded form. The term may (or may not) encompass oligonucleotides containing known analogues of natural nucleotides. The term also may (or may not) encompass nucleic acid-like structures with synthetic backbones, see, e.g., Eckstein, 1991; Baserga et ah, 1992; Milligan, 1993; WO 97/03211; WO 96/39154; Mata, 1997; Strauss-Soukup, 1997; and Samstag, 1996. The term encompasses both ribonucleic acid (RNA) and DNA, including cDNA, genomic DNA, synthetic, synthesized (e.g., chemically synthesized) DNA, and/or DNA (or RNA) containing nucleic acid analogs. The nucleotides Adenine (A), Thymine (T), Guanine (G) and Cytosine (C) also may (or may not) encompass nucleotide modifications, e.g., methylated and/or hydroxylated nucleotides, e.g., Cytosine (C) encompasses 5-methylcytosine and 5-hydroxymethylcytosine. The nucleic acid can be in any topological conformation. For instance, the nucleic acid can be single-stranded, double-stranded, triple-stranded, quadruplexed, partially double-stranded, branched, hairpinned, circular, or in a padlocked conformation.

### Nucleic Acid-Guided Nuclease

[0223] As used herein, the term “nucleic acid-guided nuclease” or “nucleic acid-guided endonuclease” refers to a nuclease (e.g., Cas12a) that associates covalently or non-covalently with a guide nucleic acid (e.g., a guide RNA or a guide DNA) thereby forming a complex between the guide nucleic acid and the nucleic acid-guided nuclease. The guide nucleic acid comprises a spacer sequence which comprises a nucleotide sequence having complementarity with a strand of a target DNA sequence. Thus, the nucleic acid-guided nuclease is indirectly guided or programmed to localize to a specific site in a DNA molecule through its association with the guide nucleic acid, which directly binds or anneals to a strand of the target DNA through its complementarity region via Watson-Crick base-pairing. In some embodiments, the nucleic acid-guided nuclease will include a DNA-binding activity (e.g., as in the case for CRISPR Cas12a). Most commonly, the nucleic acid-guided nuclease is programmed by associating with a guide RNA molecule and in such cases the nuclease may be called “RNA-guided nuclease.” When programmed by a guide DNA, the nuclease may be called a “DNA-guided nuclease.” Nucleic acid-guided, RNA-guided, or DNA-guided nucleases may also be referred to as “programmable nucleases,” which also include other classes of programmable nucleases which associate with specific DNA sequences through amino acid/nucleotide sequence recognition (e.g., zinc fingers nucleases (ZFN) and transcription activator like effector nucleases (TALEN)) rather than through guide RNAs. In addition, any nuclease contemplated herein may also be engineered to remove, inactivate, or otherwise eliminate one or more nuclease activities (e.g., by introducing a nuclease-inactivating mutation in the active site(s) of a nuclease, e.g., in the RuvC domain of a Cas12a). A nuclease that has been modified to remove, inactivate, or otherwise eliminate all nuclease activity may be referred to as a “dead” nuclease. A dead nuclease is not able to cut either strand of a double-stranded DNA molecule. A nuclease that has been modified to remove, inactivate, or otherwise eliminate at least one nuclease activity but which still retains at least one nuclease activity may be referred to as a “nickase” nuclease. A nickase nuclease cuts one strand of a double-stranded DNA molecule, but not both strands. For example, a CRISPR Cas9 naturally comprises two distinct nuclease activity domains, namely, the HNH domain and the RuvC domain. The HNH domain cuts the strand of DNA bound to the guide RNA and the RuvC domain cuts the protospacer strand. One can obtain a nickase Cas9 by inactivating either the HNH domain or the RuvC domain. One can obtain a dead Cas9 by inactivating both the HNH domain and the RuvC domain. Other RNA-guided nuclease may be similarly converted to nickases and/or dead nucleases by inactivating one or more of the existing nuclease domains.

### Off-Target Effects

[0224] “Off-target effects” refer to non-specific genetic modifications that can occur when the CRISPR nuclease binds at a different genomic site than its intended target due to mismatch tolerance Hsu, P., Scott, D., Weinstein, J. et al. DNA targeting specificity of RNA-guided Cas9 nucleases. Nat Biotechnol 31, 827-832 (2013). https://doi.org/10.1038/nbt.2647.

### Operably Linked

[0225] As used herein, the term “operably linked” or “under transcriptional control,” when used in conjunction with the description of a promoter, refers to the correct location and orientation in relation to a polynucleotide (e.g., a coding sequence) to control the initiation of transcription by RNA polymerase and expression of the coding sequence, such as one for the msr gene, msd gene, and/or the ret gene. Other transcriptional control regulatory elements (e g, enhancer sequences, transcription factor binding sites) may also be operably linked to a gene if their location relative to a gene controls or regulates the expression of the gene.

### PEG Lipid

[0226] As used herein, a “PEG lipid” or “PEGylated lipid” refers to a lipid comprising a polyethylene glycol component.

### Peptide

[0227] As used herein, the terms “peptide,” “polypeptide,” and “protein” are used interchangeably, and refer to a compound comprised of amino acid residues covalently linked by peptide bonds. A protein or peptide must contain at least two amino acids, and no limitation is placed on the maximum number of amino acids that can comprise a protein's or peptide's sequence. Polypeptides include any peptide or protein comprising two or more amino acids joined to each other by peptide bonds. As used herein, the term refers to both short chains, which also commonly are referred to in the art as peptides, oligopeptides and oligomers, for example, and to longer chains, which generally are referred to in the art as proteins, of which there are many types. “Polypeptides” include, for example, biologically active fragments, substantially homologous polypeptides, oligopeptides, homodimers, heterodimers, variants of polypeptides, modified polypeptides, derivatives, analogs, fusion proteins, among others. The polypeptides include natural peptides, recombinant peptides, synthetic peptides, or a combination thereof.

### Promoter

[0228] As used herein, the term “promoter” is art-recognized and refers to a nucleic acid molecule with a sequence recognized by the cellular transcription machinery and which is able to initiate transcription of a downstream gene. A promoter can be constitutively active, meaning that the promoter is always active in a given cellular context, or conditionally active, meaning that the promoter is only active in the presence of a specific condition. For example, a conditional promoter may only be active in the presence of a specific protein that connects a protein associated with a regulatory element in the promoter to the basic transcriptional machinery, or only in the absence of an inhibitory molecule. Within the promoter sequence will be found a transcription initiation site, as well as protein binding domains responsible for the binding of RNA polymerase. Eukaryotic promoters will often, but not always, contain “TATA” boxes and “CAT” boxes. Various promoters, including inducible promoters, may be used to drive expression by the various vectors of the present disclosure.

### Programmable Nuclease

[0229] As used herein, the term “programmable nuclease” is meant to refer to a polypeptide that has the property of selective localization to a specific desired nucleotide sequence target in a nucleic acid molecule (e.g., to a specific gene target) due to one or more targeting functions. Such targeting functions can include one or more DNA-binding domains, such as zinc finger domains characteristic of many different types of DNA binding proteins or TALE domains characteristic of TALEN proteins. Such targeting function may also include the ability to associate and/or form a complex with a guide RNA, which then localizes to a specific site on the DNA which bears a sequence that is complementary to a portion of the guide RNA (i.e., the spacer of the guide RNA). In some embodiments, the programmable nuclease may be a single protein which comprises both a domain that binds directly (e.g., a ZF protein) or indirectly (e.g., an RNA-guided protein) to a target DNA site, as well as a nuclease domain. In other embodiments, the programmable nuclease may be a composite of two or more separate proteins or domains (from different proteins) which together provide the necessary functions of selective DNA binding and nuclease activity. For example, the programmable nuclease may comprise a (a) nuclease-inactive RNA-guided nuclease (which still is capable of binding a guide RNA, localizing to a target DNA, and binding to the target DNA, but not capable of cutting or nicking the strands) fused to a (b) nuclease protein or domain, such as a FokI nuclease.

### Polypeptide

[0230] The term “polypeptide” encompasses both naturally-occurring and non-naturally-occurring proteins, and fragments, mutants, derivatives and analogs thereof. A polypeptide may be monomeric or polymeric. Further, a polypeptide may comprise a number of different domains each of which has one or more distinct activities.

### Polypeptide Fragment

[0231] The term “polypeptide fragment” as used herein refers to a polypeptide that has a deletion, e.g., an amino-terminal and/or carboxy-terminal deletion compared to a full-length polypeptide. In a preferred embodiment, the polypeptide fragment is a contiguous sequence in which the amino acid sequence of the fragment is identical to the corresponding positions in the naturally-occurring sequence. Fragments typically are at least 5, 6, 7, 8, 9 or 10 amino acids long, preferably at least 12, 14, 16 or 18 amino acids long, more preferably at least 20 amino acids long, more preferably at least 25, 30, 35, 40 or 45, amino acids, even more preferably at least 50 or 60 amino acids long, and even more preferably at least 70 amino acids long.

### Polypeptide Mutant

[0232] A “polypeptide mutant” or “mutein” refers to a polypeptide whose sequence contains an insertion, duplication, deletion, rearrangement or substitution of one or more amino acids compared to the amino acid sequence of a native or wild-type protein. A mutein may have one or more amino acid point substitutions, in which a single amino acid at a position has been changed to another amino acid, one or more insertions and/or deletions, in which one or more amino acids are inserted or deleted, respectively, in the sequence of the naturally-occurring protein, and/or truncations of the amino acid sequence at either or both the amino or carboxy termini. A mutein may have the same but preferably has a different biological activity compared to the naturally-occurring protein. A mutein has at least 85% overall sequence homology to its wild-type counterpart. Even more preferred are muteins having at least 90% overall sequence homology to the wild-type protein. In an even more preferred embodiment, a mutein exhibits at least 95% sequence identity, even more preferably 98%, even more preferably 99% and even more preferably 99.9% overall sequence identity.

[0233] Sequence homology may be measured by any common sequence analysis algorithm, such as Gap or Bestfit.

[0234] Amino acid substitutions can include those which: (1) reduce susceptibility to proteolysis, (2) reduce susceptibility to oxidation, (3) alter binding affinity for forming protein complexes, (4) alter binding affinity or enzymatic activity, and (5) confer or modify other physicochemical or functional properties of such analogs.

[0235] As used herein, the twenty conventional amino acids and their abbreviations follow conventional usage. See Immunology—A Synthesis (Golub and Gren eds., Sinauer Associates, Sunderland, Mass., 2^{nd} ed. 1991), which is incorporated herein by reference. Stereoisomers (e.g., D-amino acids) of the twenty conventional amino acids, unnatural amino acids such as α-, α-disubstituted amino acids, N-alkyl amino acids, and other unconventional amino acids may also be suitable components for polypeptides of the present invention. Examples of unconventional amino acids include: 4-hydroxyproline, γ-carboxyglutamate, ε-N,N,N-trimethyllysine, ε-N-acetyllysine, O-phosphoserine, N-acetylserine, N-formylmethionine, 3-methylhistidine, 5-hydroxylysine, N-methylarginine, and other similar amino acids and imino acids (e.g., 4-hydroxyproline). In the polypeptide notation used herein, the left-hand end corresponds to the amino terminal end and the right-hand end corresponds to the carboxy-terminal end, in accordance with standard usage and convention.

### Recombinant

[0236] The term “recombinant” refers to a biomolecule, e.g., a gene or protein, that (1) has been removed from its naturally occurring environment, (2) is not associated with all or a portion of a polynucleotide in which the gene is found in nature, (3) is operatively linked to a polynucleotide which it is not linked to in nature, or (4) does not occur in nature. The term “recombinant” can be used in reference to cloned DNA isolates, chemically synthesized polynucleotide analogs, or polynucleotide analogs that are biologically synthesized by heterologous systems, as well as proteins and/or mRNAs encoded by such nucleic acids.

[0237] As used herein, an endogenous nucleic acid sequence in the genome of an organism (or the encoded protein product of that sequence) is deemed “recombinant” herein if a heterologous sequence is placed adjacent to the endogenous nucleic acid sequence, such that the expression of this endogenous nucleic acid sequence is altered. In this context, a heterologous sequence is a sequence that is not naturally adjacent to the endogenous nucleic acid sequence, whether or not the heterologous sequence is itself endogenous (originating from the same host cell or progeny thereof) or exogenous (originating from a different host cell or progeny thereof). By way of example, a promoter sequence can be substituted (e.g., by homologous recombination) for the native promoter of a gene in the genome of a host cell, such that this gene has an altered expression pattern. This gene would now become “recombinant” because it is separated from at least some of the sequences that naturally flank it.

[0238] A nucleic acid is also considered “recombinant” if it contains any modifications that do not naturally occur to the corresponding nucleic acid in a genome. For instance, an endogenous coding sequence is considered “recombinant” if it contains an insertion, deletion or a point mutation introduced artificially, e.g., by human intervention. A “recombinant nucleic acid” also includes a nucleic acid integrated into a host cell chromosome at a heterologous site and a nucleic acid construct present as an episome.

### Recombinant Host Cell

[0239] The term “recombinant host cell” (or simply “host cell”), as used herein, is intended to refer to a cell into which a recombinant vector has been introduced. It should be understood that such terms are intended to refer not only to the particular subject cell but to the progeny of such a cell. Because certain modifications may occur in succeeding generations due to either mutation or environmental influences, such progeny may not, in fact, be identical to the parent cell, but are still included within the scope of the term “host cell” as used herein. A recombinant host cell may be an isolated cell or cell line grown in culture or may be a cell which resides in a living tissue or organism.

[0240] Suitable methods of genetic modification such as “transformation” include e.g., viral or bacteriophage infection, transfection, conjugation, protoplast fusion, lipofection, electroporation, calcium phosphate precipitation, polyethyleneimine (PEI)-mediated transfection, DEAE-dextran mediated transfection, liposome-mediated transfection, particle gun technology, calcium phosphate precipitation, direct micro injection, nanoparticle-mediated nucleic acid delivery (see, e.g., Panyam et al., Adv Drug Deliv Rev. 2012 Sep. 13. pii: 50169-409X(12)00283-9. doi: 10.1016/j.addr.2012.09.023), and the like. The choice of method of genetic modification is generally dependent on the type of cell being transformed and the circumstances under which the transformation is taking place (e.g., in vitro, ex vivo, or in vivo). A general discussion of these methods can be found in Ausubel, et al., Short Protocols in Molecular Biology, 3rd ed., Wiley & Sons, 1995.

### Recombinant Nucleic Acid

[0241] A “recombinant nucleic acid” or “recombinant nucleotide” refers to a molecule that is constructed by joining nucleic acid molecules, which optionally may self-replicate in a live cell. Recombinant nucleic acids and synthetic nucleic acids also include those molecules that result from the replication of either of the foregoing.

### Region

[0242] The term “region” as used herein refers to a physically contiguous portion of the primary structure of a biomolecule. In the case of proteins, a region is defined by a contiguous portion of the amino acid sequence of that protein.

### RNA-Guided Nuclease

[0243] As used herein, an “RNA-guided nuclease” is a type of “programmable nuclease,” and a specific type of “nucleic acid-guided nuclease.” As used herein, the term “RNA-guided nuclease” or “RNA-guided endonuclease” refers to a nuclease that associates covalently or non-covalently with a guide RNA thereby forming a complex between the guide RNA and the RNA-guided nuclease. The guide RNA comprises a spacer sequence which comprises a nucleotide sequence having complementarity with a strand of a target DNA sequence. Thus, the RNA-guided nuclease is indirectly guided or programmed to localize to a specific site in a DNA molecule through its association with the guide RNA, which directly binds or anneals to a strand of the target DNA through its complementarity region via Watson-Crick base-pairing.

### Sequence Identity

[0244] As used herein, the term “sequence identity” refers to the overall relatedness between polymeric molecules, e.g., between polynucleotide molecules (e.g., DNA molecules and/or RNA molecules) and/or between polypeptide molecules. Calculation of the percent identity of two polynucleotide sequences, for example, can be performed by aligning the two sequences for optimal comparison purposes (e.g., gaps can be introduced in one or both of a first and a second nucleic acid sequences for optimal alignment and non-identical sequences can be disregarded for comparison purposes). For example, the length of a sequence aligned for comparison purposes is at least 30%, at least 40%, at least 50%, at least 60%, at least 70%, at least 80%, at least 90%, at least 95%, or 100% of the length of the reference sequence. The nucleotides at corresponding nucleotide positions are then compared. In other examples, the length of sequence identity comparison may be over a stretch of at least about nine nucleotides, usually at least about 20 nucleotides, more usually at least about 24 nucleotides, typically at least about 28 nucleotides, more typically at least about 32 nucleotides, and preferably at least about 36 or more nucleotides. When a position in the first sequence is occupied by the same nucleotide as the corresponding position in the second sequence, then the molecules are identical at that position. The percent identity between the two sequences is a function of the number of identical positions shared by the sequences, taking into account the number of gaps, and the length of each gap, which needs to be introduced for optimal alignment of the two sequences. The comparison of sequences and determination of percent identity between two sequences can be accomplished using a mathematical algorithm. For example, the percent identity between two nucleotide sequences can be determined using methods such as those described in Computational Molecular Biology, Lesk, A. M., ed., Oxford University Press, New York, 1988; Biocomputing: Informatics and Genome Projects, Smith, D. W., ed., Academic Press, New York, 1993; Sequence Analysis in Molecular Biology, von Heinje, G., Academic Press, 1987; Computer Analysis of Sequence Data, Part I, Griffin, A. M., and Griffin, H. G., eds., Humana Press, New Jersey, 1994; and Sequence Analysis Primer, Gribskov, M. and Devereux, J., eds., M Stockton Press, New York, 1991; each of which is incorporated herein by reference. For example, the percent identity between two nucleotide sequences can be determined using the algorithm of Meyers and Miller (CABIOS, 1989, 4:11-17), which has been incorporated into the ALIGN program (version 2.0) using a PAM120 weight residue table, a gap length penalty of 12 and a gap penalty of 4. The percent identity between two nucleotide sequences can, alternatively, be determined using the GAP program in the GCG software package using an NWSgapdna. CMP matrix. Methods commonly employed to determine percent identity between sequences include, but are not limited to those disclosed in Carillo, H. and Lipman, D., SIAM J Applied Math., 48:1073 (1988); incorporated herein by reference. Techniques for determining identity are codified in publicly available computer programs. Exemplary computer software to determine homology between two sequences include, but are not limited to, GCG program package, Devereux, J., et al., Nucleic Acids Research, 12(1), 387 (1984)), BLASTP, BLASTN, and FASTA (Altschul et al., J. Mol. Biol. 215:403-410 (1990);

[0245] Gish and States, Nature Genet. 3:266-272 (1993); Madden et al., Meth. Enzymol. 266:131-141 (1996); Altschul et al., Nucleic Acids Res. 25:3389-3402 (1997); Zhang and Madden, Genome Res. 7:649-656 (1997)), (Altschul et al., Nucleic Acids Res. 25:3389-3402 (1997)). Polynucleotide sequences, for instance, can be compared using FASTA, Gap or Bestfit, which are programs in Wisconsin Package Version 10.0, Genetics Computer Group (GCG), Madison, Wis. FASTA provides alignments and percent sequence identity of the regions of the best overlap between the query and search sequences. Pearson, Methods Enzymol. 183:63-98 (1990) (hereby incorporated by reference in its entirety). Percent sequence identity between nucleic acid sequences, for instance, can be determined using FASTA with its default parameters (a word size of 6 and the NOPAM factor for the scoring matrix) or using Gap with its default parameters as provided in GCG Version 6.1.

### Specific Binding

[0246] “Specific binding” refers to the ability of two molecules to bind to each other in preference to binding to other molecules in the environment. Typically, “specific binding” discriminates over adventitious binding in a reaction by at least two-fold, more typically by at least 10-fold, often at least 100-fold. Typically, the affinity or avidity of a specific binding reaction, as quantified by a dissociation constant, is about 10⁻⁷ M or stronger (e.g., about 10⁻⁸ M, 10⁻⁹ M or even stronger).

### Stem and Loop

[0247] As used herein, the term “stem” refers to two or more base pairs, such as 3, 4, 5, 6, 7, 8, 9, 10, 11, 12, 13, 14, 15, 16, 17, 18, 19, 20 or more base pairs, formed by inverted repeat sequences connected at a “tip,” where the more 5′ or “upstream” strand of the stem bends to allows the more 3′ or “downstream” strand to base-pair with the upstream strand. The number of base pairs in a stem is the “length” of the stem. The tip of the stem is typically at least 3 nucleotides, but can be 4, 5, 6, 7, 8, 9, 10, 11, 12, 13, 14, or more nucleotides.

[0248] Larger tips with more than 5 nucleotides are also referred to as a “loop.” An otherwise continuous stem may be interrupted by one or more bulges as defined herein. The number of unpaired nucleotides in the bulge(s) are not included in the length of the stem. The position of a bulge closest to the tip can be described by the number of base pairs between the bulge and the tip (e.g., the bulge is 4 bps from the tip). The position of the other bulges (if any) further away from the tip can be described by the number of base pairs in the stem between the bulge in question and the tip, excluding any unpaired bases of other bulges in between. As used herein, the term “loop” in the polynucleotide refers to a single stranded stretch of one or more nucleotides, such as 2, 3, 4, 5, 6, 7, 8, 9, or 10 nucleotides, wherein the most 5′ nucleotide and the most 3′ nucleotide of the loop are each linked to a base-paired nucleotide in a stem.

[0249] A “stem-loop structure” or a “hairpin” refers to a nucleic acid having a secondary structure that includes a region of nucleotides which are known or predicted to form a double strand (stem portion) that is linked on one side by a region of predominantly single-stranded nucleotides (loop portion). Such structures are well known in the art and these terms are used consistently with their known meanings in the art. As is known in the art, a stem-loop structure does not require exact base-pairing. Thus, the stem may include one or more base mismatches. Alternatively, the base-pairing may be exact, i.e., not include any mismatches. [0077] As used herein, the term “operably linked” or “under transcriptional control,” when used in conjunction with the description of a promoter, refers to the correct location and orientation in relation to a polynucleotide (e.g., a coding sequence) to control the initiation of transcription by RNA polymerase and expression of the coding sequence.

### Stringent Hybridization

[0250] In general, “stringent hybridization” is performed at about 25° C. below the thermal melting point (Tm) for the specific DNA hybrid under a particular set of conditions. “Stringent washing” is performed at temperatures about 5° C. lower than the Tm for the specific DNA hybrid under a particular set of conditions. The Tm is the temperature at which 50% of the target sequence hybridizes to a perfectly matched probe. See Sambrook et al., Molecular Cloning: A Laboratory Manual, 2d ed., Cold Spring Harbor Laboratory Press, Cold Spring Harbor, N.Y. (1989), page 9.51, hereby incorporated by reference. For purposes herein, “stringent conditions” are defined for solution phase hybridization as aqueous hybridization (i.e., free of formamide) in 6×SSC (where 20×SSC contains 3.0 M NaCl and 0.3 M sodium citrate), 1% SDS at 65° C. for 8-12 hours, followed by two washes in 0.2×SSC, 0.1% SDS at 65° C. for 20 minutes. It will be appreciated by the skilled worker that hybridization at 65° C. will occur at different rates depending on a number of factors including the length and percent identity of the sequences which are hybridizing. Hybridization does not require the sequence of the polynucleotide to be 100% complementary to the target polynucleotide. Hybridization also includes one or more segments such that intervening or adjacent segments that are not involved in the hybridization event (e.g., a loop structure or hairpin structure).

[0251] The nucleic acids (also referred to as polynucleotides) of this present invention may include both sense and antisense strands of RNA, cDNA, genomic DNA, and synthetic forms and mixed polymers of the above. They may be modified chemically or biochemically or may contain non-natural or derivatized nucleotide bases, as will be readily appreciated by those of skill in the art. Such modifications include, for example, labels, methylation, substitution of one or more of the naturally occurring nucleotides with an analog, internucleotide modifications such as uncharged linkages (e.g., methyl phosphonates, phosphotriesters, phosphoramidates, carbamates, etc.), charged linkages (e.g., phosphorothioates, phosphorodithioates, etc.), pendent moieties (e.g., polypeptides), intercalators (e.g., acridine, psoralen, etc.), chelators, alkylators, and modified linkages (e.g., alpha anomeric nucleic acids, etc.) Also included are synthetic molecules that mimic polynucleotides in their ability to bind to a designated sequence via hydrogen bonding and other chemical interactions. Such molecules are known in the art and include, for example, those in which peptide linkages substitute for phosphate linkages in the backbone of the molecule. Other modifications can include, for example, analogs in which the ribose ring contains a bridging moiety or other structure such as the modifications found in “locked” nucleic acids.

### Subject

[0252] As used herein, the term“subject” refers to an individual organism, for example, an individual mammal. In some embodiments, the subject is a human. In some embodiments, the subject is a non-human mammal. In some embodiments, the subject is a non-human primate. In some embodiments, the subject is a rodent. In some embodiments, the subject is a sheep, a goat, a cattle, a cat, or a dog. In some embodiments, the subject is a vertebrate, an amphibian, a reptile, a fish, an insect, a fly, or a nematode. In some embodiments, the subject is a research animal. In some embodiments, the subject is genetically engineered, e.g., a genetically engineered non-human subject. The subject may be of either sex and at any stage of development. The terms “individual,” “subject,” “host,” and “patient,” used interchangeably herein.

### Synthetic Nucleic Acid

[0253] A “synthetic or artificial nucleic acid” refers nucleic acids that are non-naturally occurring sequences. Such sequences do not originate from, or are not known to be present in any living organism (e.g., based on sequence search in existing sequence databases).

### Targeted Polynucleotide Sequence

[0254] As used herein “targeted polynucleotide sequence” refers to a DNA polynucleotide that comprises a “target site” or “target sequence.” The terms “target site,” “target sequence,” “target protospacer DNA,” or “protospacer-like sequence” are used interchangeably herein to refer to a nucleic acid sequence present in a targeted polynucleotide sequence to which a DNA-targeting segment of a guide RNA will recognize and/or bind, provided sufficient conditions for binding exist. For example, the target site (or target sequence) 5′-GAGCATATC-3′ within a targeted polynucleotide sequence is targeted by (or is bound by, or hybridizes with, or is complementary to) the RNA sequence 5′-GAUAUGCUC-3′. Suitable DNA/RNA binding conditions include physiological conditions normally present in a cell.

[0255] Other suitable DNA/RNA binding conditions (e.g., conditions in a cell-free system) are known in the art; see, e.g., Sambrook, supra. The strand of the targeted polynucleotide sequence that is complementary to and hybridizes with the guide RNA is referred to as the “complementary strand” and the strand of the targeted polynucleotide sequence that is complementary to the “complementary strand” (and is therefore not complementary to the guide RNA) is referred to as the “noncomplementary strand” or “non-complementary strand.”

### Target Site

[0256] As used herein, a “target site” as used herein is a polynucleotide (e.g., DNA such as genomic DNA) that includes a site or specific locus (“target site” or “target sequence”) targeted by a Cas12a gene editing system disclosed herein. In the context of a Cas12a gene editing system disclosed herein that comprise an RNA-guided nuclease, a target sequence is the sequence to which the guide sequence of a guide nucleic acid (e.g., guide RNA) will hybridize. For example, the target site (or target sequence) 5′-GTCAATGGACC-3′(SEQ ID NO: 715) within a target nucleic acid is targeted by (or is bound by, or hybridizes with, or is complementary to) the sequence 5′-GGTCCATTGAC-3′(SEQ ID NO: 716). Suitable hybridization conditions include physiological conditions normally present in a cell. For a double stranded target nucleic acid, the strand of the target nucleic acid that is complementary to and hybridizes with the guide RNA is referred to as the “complementary strand” or “target strand”; while the strand of the target nucleic acid that is complementary to the “target strand” (and is therefore not complementary to the guide RNA) is referred to as the “non-target strand” or “non-complementary strand.”

### Therapeutic

[0257] The term “therapeutic” as used herein means a treatment and/or prophylaxis. A therapeutic effect is obtained by suppression, diminution, remission, or eradication of at least one sign or symptom of a disease or disorder state.

### Therapeutically Effective Amount

[0258] The term “therapeutically effective amount” refers to the amount of the subject compound that will elicit the biological or medical response of a tissue, system, or subject that is being sought by the researcher, veterinarian, medical doctor or other clinician. The term “therapeutically effective amount” includes that amount of a compound that, when administered, is sufficient to prevent development of, or alleviate to some extent, one or more of the signs or symptoms of the disorder or disease being treated. The therapeutically effective amount will vary depending on the compound, the disease and its severity and the age, weight, etc., of the subject to be treated.

### Treat or Treatment

[0259] To “treat” a disease as the term is used herein, means to reduce the frequency or severity of at least one sign or symptom of a disease or disorder experienced by a subject. Treatment

[0260] As used herein, the terms “treatment,” “treat,” and “treating,” refer to a clinical intervention aimed to reverse, alleviate, delay the onset of, or inhibit the progress of a disease or disorder, or one or more symptoms thereof, as described herein. In some embodiments, treatment may be administered after one or more symptoms have developed and/or after a disease has been diagnosed. In other embodiments, treatment may be administered in the absence of symptoms, e.g., to prevent or delay onset of a symptom or inhibit onset or progression of a disease. For example, treatment may be administered to a susceptible individual prior to the onset of symptoms (e.g., in light of a history of symptoms and/or in light of genetic or other susceptibility factors). Treatment may also be continued after symptoms have resolved, for example, to prevent or delay their recurrence.

### Upstream and Downstream

[0261] As used herein, the terms “upstream” and “downstream” are terms of relativity that define the linear position of at least two elements located in a nucleic acid molecule (whether single or double-stranded) that is orientated in a 5′-to-3′ direction. A first element is said to be upstream of a second element in a nucleic acid molecule where the first element is positioned somewhere that is 5′ to the second element. Conversely, a first element is downstream of a second element in a nucleic acid molecule where the first element is positioned somewhere that is 3′ to the second element.

### Variant

[0262] As used herein the term “variant” should be taken to mean the exhibition of qualities that have a pattern that deviates from what occurs in nature, e.g., a variant retron RT is retron RT comprising one or more changes in amino acid residues as compared to a wild type retron RT amino acid sequence. The term“variant” encompasses homologous proteins having at least 75%, or at least 80%, or at least 85%, or at least 90%, or at least 95%, or at least 99% percent identity with a reference sequence and having the same or substantially the same functional activity or activities as the reference sequence. The term also encompasses mutants, truncations, or domains of a reference sequence, and which display the same or substantially the same functional activity or activities as the reference sequence.

### Vector

[0263] As used herein, the term “vector” permits or facilitates the transfer of a polynucleotide from one environment to another. It is a replicon such as a plasmid, phage, or cosmid into which another DNA segment may be inserted so as to bring about the replication of the inserted segment. Generally, a vector is capable of replication when associated with the proper control elements. The term “vector” may include cloning and expression vectors, as well as viral vectors and integrating vectors.

### Wild Type

[0264] As used herein the term “wild type” is a term of the art understood by skilled persons and means the typical form of an organism, strain, gene, protein, or characteristic as it occurs in nature as distinguished from mutant or variant forms

### B. Chemical Definitions

### Alkyl

[0265] “Alkyl” refers to a straight or branched hydrocarbon chain radical consisting solely of carbon and hydrogen atoms, which is saturated or unsaturated (i.e., contains one or more double and/or triple bonds), having from one to thirty or more carbon atoms (e.g., C1-C24 alkyl), one to twelve carbon atoms (C1-C12 alkyl), one to eight carbon atoms (C1-C8 alkyl) or one to six carbon atoms (C1-C6 alkyl) and which is attached to the rest of the molecule by a single bond, e.g., methyl, ethyl, n propyl, 1-methylethyl (iso propyl), n butyl, n pentyl, 1,1 dimethylethyl (t butyl), 3 methylhexyl, 2 methylhexyl, ethenyl, propyl enyl, but-1-enyl, pent-1-enyl, penta-1,4-dienyl, ethynyl, propynyl, butynyl, pentynyl, hexynyl, and the like. Alkyl groups that include one or more units of unsaturation (one or more double and/or triple bond) can be C2-C24, C2-C12, C2-C8 or C2-C6 groups, for example. Unless specifically stated otherwise, an alkyl group is optionally substituted. The term “alkyl,” by itself or as part of another substituent means, unless otherwise stated, a straight or branched chain hydrocarbon having the number of carbon atoms designated (i.e., C1-6 means one to six carbon atoms) and includes straight, branched chain, or cyclic substituent groups.

### Alkoxy

[0266] For example, the term “alkoxy” employed alone or in combination with other terms means, unless otherwise stated, an alkyl group having the designated number of carbon atoms, as defined above, connected to the rest of the molecule via an oxygen atom, such as, for example, methoxy, ethoxy, 1-propoxy, 2-propoxy (isopropoxy) and the higher homologs and isomers. Preferred are (C1-C3) alkoxy, particularly ethoxy and methoxy.

### Alkylamino

[0267] As used herein, the terms “alkoxy,” “alkylamino” and “alkylthio” are used in their conventional sense, and refer to alkyl groups linked to molecules via an oxygen atom, an amino group, a sulfur atom, respectively.

### Alkylene

[0268] “Alkylene” or “alkylene chain” refers to a straight or branched divalent hydrocarbon chain consisting solely of carbon and hydrogen, which is saturated or unsaturated (i.e., contains one or more double (alkenylene) and/or triple bonds (alkynylene)), and having, for example, from one to thirty or more carbon atoms (e.g., C1-C24 alkylene), one to fifteen carbon atoms (C1-C15 alkylene), one to twelve carbon atoms (C1-C12 alkylene), one to eight carbon atoms (C1-C8 alkylene), one to six carbon atoms (C1-C6 alkylene), two to four carbon atoms (C2-C4 alkylene), one to two carbon atoms (C1-C2 alkylene), e.g., methylene, ethylene, propylene, n-butylene, ethenylene, propenylene, n-butenylene, propynylene, n-butynylene, and the like. Alkylene groups that include one or more units of unsaturation (one or more double and/or triple bond) can be C2-C24, C2-C12, C2-C8 or C2-C6 groups, for example. The alkylene chain is attached to the rest of the molecule through a single or double bond and to the radical group through a single or double bond. The points of attachment of the alkylene chain to the rest of the molecule and to the radical group can be through one carbon or any two carbons within the chain. Unless stated otherwise specifically in the specification, an alkylene chain may be optionally substituted.

### Amino Aryl

[0269] As used herein, the term “amino aryl” refers to an aryl moiety which contains an amino moiety. Such amino moieties may include, but are not limited to primary amines, secondary amines, tertiary amines, quaternary amines, masked amines, or protected amines. Such tertiary amines, masked amines, or protected amines may be converted to primary amine or secondary amine moieties. Additionally, the amine moiety may include an amine-like moiety which has similar chemical characteristics as amine moieties, including but not limited to chemical reactivity.

### Aromatic

[0270] As used herein, the term “aromatic” refers to a carbocycle or heterocycle with one or more polyunsaturated rings and having aromatic character, i.e. having (4n+2) delocalized p (pi) electrons, where n is an integer.

### Aryl

[0271] As used herein, the term “aryl,” employed alone or in combination with other terms, means, unless otherwise stated, a carbocyclic aromatic system containing one or more rings (typically one, two or three rings) wherein such rings may be attached together in a pendent manner, such as a biphenyl, or may be fused, such as naphthalene. Examples include phenyl, anthracyl, and naphthyl. Preferred are phenyl and naphthyl, most preferred is phenyl.

### Cycloakylene

[0272] “Cycloalkylene” is a divalent cycloalkyl group. Unless otherwise stated specifically in the specification, a cycloalkylene group may be optionally substituted.

### Cycloalkyl

[0273] “Cycloalkyl” or “carbocyclic ring” refers to a stable non aromatic monocyclic or polycyclic hydrocarbon radical consisting solely of carbon and hydrogen atoms, which may include fused or bridged ring systems, having from three to fifteen carbon atoms, preferably having from three to ten carbon atoms, and which is saturated or unsaturated and attached to the rest of the molecule by a single bond. Monocyclic radicals include, for example, cyclopropyl, cyclobutyl, cyclopentyl, cyclohexyl, cycloheptyl, and cyclooctyl. Polycyclic radicals include, for example, adamantyl, norbomyl, decalinyl, 7,7 dimethyl bicyclo[2.2.1]heptanyl, and the like. Unless specifically stated otherwise, a cycloalkyl group is optionally substituted.

### Halo

[0274] As used herein, the term “halo” or “halogen” alone or as part of another substituent means, unless otherwise stated, a fluorine, chlorine, bromine, or iodine atom, preferably, fluorine, chlorine, or bromine, more preferably, fluorine or chlorine.

### Heteroalkyl

[0275] As used herein, the term “heteroalkyl” by itself or in combination with another term means, unless otherwise stated, a stable straight or branched chain alkyl group consisting of the stated number of carbon atoms and one or two or more heteroatoms typically selected from the group consisting of O, N, Si, P, and S, and wherein the nitrogen and sulfur atoms may be optionally oxidized and the nitrogen heteroatom may be a primary, secondary, tertiary or quaternary nitrogen. The heteroatom(s) may be placed at any position of the heteroalkyl group, including between the rest of the heteroalkyl group and the fragment to which it is attached, as well as attached to the most distal carbon atom in the heteroalkyl group. Examples of heteroalkyl groups include: —O—CH2-CH2-CH3, —CH2-CH2-CH2-OH, —CH2-CH2-NH—CH3, —CH2-S—CH2-CH3, and —CH2CH2-S(═O)—CH3. Up to two heteroatoms may be consecutive, such as, for example, —CH2-NH—OCH3, or —CH2-CH2-S—S—CH3.

### Heteroaryl

[0276] As used herein, the term “heteroaryl” or “heteroaromatic” refers to aryl groups which contain at least one heteroatom typically selected from N, O, Si, P, and S; wherein the nitrogen and sulfur atoms may be optionally oxidized, and the nitrogen atom(s) may be optionally teriatry or quaternized. Heteroaryl groups may be substituted or unsubstituted. A heteroaryl group may be attached to the remainder of the molecule through a heteroatom. A polycyclic heteroaryl may include one or more rings that are partially saturated. Examples include tetrahydroquinoline, 2,3-dihydrobenzofuryl, 1-pyrrolyl, 2-pyrrolyl, 3-pyrrolyl, 3-pyrazolyl, 2-imidazolyl, 4-imidazolyl, pyrazinyl, 2-oxazolyl, 4-oxazolyl, 2-phenyl-4-oxazolyl, 5-oxazolyl, 3-isoxazolyl, 4-isoxazolyl, 5-isoxazolyl, 2-thiazolyl, 4-thiazolyl, 5-thiazolyl, 2-furyl, 3-furyl, 2-thienyl, 3-thienyl, 2-pyridyl, 3-pyridyl, 4-pyridyl, 2-pyrimidyl, 4-pyrimidyl, 5-benzothiazolyl, purinyl, 2-benzimidazolyl, 5-indolyl, 1-isoquinolyl, 5-isoquinolyl, 2-quinoxalinyl, 5-quinoxalinyl, 3-quinolyl, and 6-quinolyl. Examples of non-aromatic heterocycles include monocyclic groups such as aziridine, oxirane, thiirane, azetidine, oxetane, thietane, pyrrolidine, pyrroline, imidazoline, pyrazolidine, dioxolane, sulfolane, 2,3-dihydrofuran, 2,5-dihydrofuran, tetrahydrofuran, thiophane, piperidine, 1,2,3,6-tetrahydropyridine, 1,4-dihydropyridine, piperazine, morpholine, thiomorpholine, pyran, 2,3-dihydropyran, tetrahydropyran, 1,4-dioxane, 1,3-dioxane, homopiperazine, homopiperidine, 1,3-dioxepane, 4,7-dihydro-1,3-dioxepin and hexamethyleneoxide. Examples of heteroaryl groups include pyridyl, pyrazinyl, pyrimidinyl (particularly 2- and 4-pyrimidinyl), pyridazinyl, thienyl, furyl, pyrrolyl (particularly 2-pyrrolyl), imidazolyl, thiazolyl, oxazolyl, pyrazolyl (particularly 3- and 5-pyrazolyl), isothiazolyl, 1,2,3-triazolyl, 1,2,4-triazolyl, 1,3,4-triazolyl, tetrazolyl, 1,2,3-thiadiazolyl, 1,2,3-oxadiazolyl, 1,3,4-thiadiazolyl and 1,3,4-oxadiazolyl. Examples of polycyclic heterocycles include indolyl (particularly 3-, 4-, 5-, 6- and 7-indolyl), indolinyl, quinolyl, tetrahydroquinolyl, isoquinolyl (particularly 1- and 5-isoquinolyl), 1,2,3,4-tetrahydroisoquinolyl, cinnolinyl, quinoxalinyl (particularly 2- and 5-quinoxalinyl), quinazolinyl, phthalazinyl, 1,8-naphthyridinyl, 1,4-benzodioxanyl, coumarin, dihydrocoumarin, 1,5-naphthyridinyl, benzofuryl (particularly 3-, 4-, 5-, 6- and 7-benzofuryl), 2,3-dihydrobenzofuryl, 1,2-benzisoxazolyl, benzothienyl (particularly 3-, 4-, 5-, 6-, and 7-benzothienyl), benzoxazolyl, benzothiazolyl (particularly 2-benzothiazolyl and 5-benzothiazolyl), purinyl, benzimidazolyl (particularly 2-benzimidazolyl), benztriazolyl, thioxanthinyl, carbazolyl, carbolinyl, acridinyl, pyrrolizidinyl, and quinolizidinyl. The aforementioned listing of heterocyclyl and heteroaryl moieties is intended to be representative and not limiting.

### Heterocyclyl

[0277] As used herein, the term “heterocyclyl” or “heterocyclic ring” refers to a stable 3- to 18-membered non-aromatic ring radical which consists of two to twelve carbon atoms and from one to six heteroatoms typically selected from the group consisting of N, O, Si, P, and S. Unless stated otherwise specifically in the specification, the heterocyclyl radical may be a monocyclic, bicyclic, tricyclic or tetracyclic ring system, which may include fused or bridged ring systems; and the nitrogen, carbon or sulfur atoms in the heterocyclyl radical may be optionally oxidized; the nitrogen atom may be optionally quaternized; and the heterocyclyl radical may be partially or fully saturated. Examples of such heterocyclyl radicals include, but are not limited to, dioxolanyl, thienyl[1,3]dithianyl, decahydroisoquinolyl, imidazolinyl, imidazolidinyl, isothiazolidinyl, isoxazolidinyl, morpholinyl, octahydroindolyl, octahydroisoindolyl, 2-oxopiperazinyl, 2-oxopiperidinyl, 2-oxopyrrolidinyl, oxazolidinyl, piperidinyl, piperazinyl, 4-piperidonyl, pyrrolidinyl, pyrazolidinyl, quinuclidinyl, thiazolidinyl, tetrahydrofuryl, trithianyl, tetrahydropyranyl, thiomorpholinyl, thiamorpholinyl, 1-oxo-thiomorpholinyl, and 1,1-dioxo-thiomorpholinyl. Unless specifically stated otherwise, a heterocyclyl group may be optionally substituted.

### Substituents

[0278] As described herein, compounds of the present disclosure may contain “optionally substituted” moieties. In general, the term “substituted”, whether preceded by the term “optionally” or not, means that one or more hydrogens of the designated moiety are replaced with a suitable substituent. Unless otherwise indicated, an “optionally substituted” group may have a suitable substituent at each substitutable position of the group, and when more than one position in any given structure may be substituted with more than one substituent selected from a specified group, the substituent may be either the same or different at every position. Combinations of substituents envisioned by this disclosure are preferably those that result in the formation of stable or chemically feasible compounds. The term “stable”, as used herein, refers to compounds that are not substantially altered when subjected to conditions to allow for their production, detection, and, in certain embodiments, their recovery, purification, and use for one or more of the purposes disclosed herein.

[0279] Suitable monovalent substituents on a substitutable carbon atom of an “optionally substituted” group are independently halogen; —(CH2)0-4R^{∘}; —(CH2)0-4OR^{∘}; —O(CH2)0-4R^{∘}, —O—(CH2)0-4C(O)OR^{∘}; —(CH2)0-4CH(OR^{∘})2; —(CH2)0-4SR^{∘}; —(CH2)0-4Ph, which may be substituted with R^{∘}; —(CH2)0-4O(CH2)0-1Ph which may be substituted with R^{∘}; —CH═CHPh, which may be substituted with R^{∘}; —(CH2)0-4O(CH2)0-1-pyridyl which may be substituted with R^{∘}; —NO2; —CN; —N3; —(CH2)0-4N(R^{∘})2; —(CH2)0-4N(R^{∘})C(O)R^{∘}; —N(R^{∘})C(S)R^{∘}; —(CH2)0-4N(R^{∘})C(O)NR^{∘} 2; —N(R^{∘})C(S)NR^{∘} 2; —(CH2)0-4N(R^{∘})C(O)OR^{∘}; —N(R^{∘})N(R^{∘})C(O)R^{∘}; —N(R^{∘})N(R^{∘})C(O)NR^{∘} 2; —N(R^{∘})N(R^{∘})C(O)OR^{∘}; —(CH2)0-4C(O)R^{∘}; —C(S)R^{∘}; —(CH2)0-4C(O)OR^{∘}; —(CH2)0-4C(O)SR^{∘}; —(CH2)0-4C(O)OSiR^{∘} 3; —(CH2)0-4OC(O)R^{∘}; —OC(O)(CH2)0-4SR^{∘}, SC(S)SR^{∘}; —(CH2)0-4SC(O)R^{∘}; —(CH2)0-4C(O)NR^{∘} 2; —C(S)NR^{∘} 2; —C(S)SR^{∘}; —SC(S)SR^{∘}, —(CH2)0-4OC(O)NR^{∘} 2; —C(O)N(OR^{∘}) R^{∘}; —C(O)C(O)R^{∘}; —C(O)CH2C(O)R^{∘}; —C(NOR^{∘})R^{∘}; —(CH2)0-4SSR^{∘}; —(CH2)0-4S(O)2R^{∘}; —(CH2)0-4S(O)2OR^{∘}; —(CH2)0-4OS(O)2R^{∘}; —S(O)2NR^{∘} 2; —(CH2)0-4S(O)R^{∘}; —N(R^{∘}) S(O)2NR^{∘} 2; —N(R^{∘})S(O)2R^{∘}; —N(OR^{∘})R^{∘}; —C(NH)NR^{∘} 2; —P(O)2R^{∘}; —P(O)R^{∘} 2; —OP(O)R^{∘} 2; —OP(O)(OR^{∘})2; SiR^{∘} 3; —(C1-4 straight or branched alkylene)O—N(R^{∘})2; or —(C1-4 straight or branched alkylene)C(O)O—N(R^{∘})2, wherein each R^{∘} may be substituted as defined below and is independently hydrogen, C1-6 aliphatic, —CH2Ph, —O(CH2)0-1Ph, —CH2-(5-6 membered heteroaryl ring), or a 5-6-membered saturated, partially unsaturated, or aryl ring having 0-4 heteroatoms independently selected from nitrogen, oxygen, or sulfur, or, notwithstanding the definition above, two independent occurrences of R^{∘}, taken together with their intervening atom(s), form a 3-12-membered saturated, partially unsaturated, or aryl mono- or bicyclic ring having 0-4 heteroatoms independently selected from nitrogen, oxygen, or sulfur, which may be substituted as defined below.

[0280] Suitable monovalent substituents on R^{∘} (or the ring formed by taking two independent occurrences of R^{∘} together with their intervening atoms), are independently halogen, —(CH2)0-2R^{●}, -(haloR^{●}), —(CH2)0-2OH, —(CH2)0-2OR^{●}, —(CH2)0-2CH(OR^{●})2; —O(haloR^{●}), —CN, —N3, —(CH2)0-2C(O)R^{●}, —(CH2)0-2C(O)OH, —(CH2)0-2C(O)OR^{●}, —(CH2)0-2SR^{●}, —(CH2)0-2SH, —(CH2)0-2NH2, —(CH2)0-2NHR^{●}, —(CH2)0-2NR^{●} 2, —NO2, —SiR^{●} 3, —OSiR^{●} 3, —C(O)SR^{●}, —(C1-4 straight or branched alkylene)C(O)OR^{●}, or —SSR^{●} wherein each R^{●} is unsubstituted or where preceded by “halo” is substituted only with one or more halogens, and is independently selected from C1-4 aliphatic, —CH2Ph, —O(CH2)0-1Ph, or a 5-6-membered saturated, partially unsaturated, or aryl ring having 0-4 heteroatoms independently selected from nitrogen, oxygen, or sulfur. Suitable divalent substituents on a saturated carbon atom of R^{∘} include ═O and ═S.

[0281] Suitable divalent substituents on a saturated carbon atom of an “optionally substituted” group include the following: ═O, ═S, ═NNR*2, NNHC(O)R*, ═NNHC(O)OR*, ═NNHS(O)2R*, ═NR*, ═NOR*, —O(C(R*2))2-3O—, or —S(C(R*2))2-3S—, wherein each independent occurrence of R* is selected from hydrogen, C1-6 aliphatic which may be substituted as defined below, or an unsubstituted 5-6-membered saturated, partially unsaturated, or aryl ring having 0-4 heteroatoms independently selected from nitrogen, oxygen, or sulfur. Suitable divalent substituents that are bound to vicinal substitutable carbons of an “optionally substituted” group include: —O(CR*2)2-3O—, wherein each independent occurrence of R* is selected from hydrogen, C1-6 aliphatic which may be substituted as defined below, or an unsubstituted 5-6-membered saturated, partially unsaturated, or aryl ring having 0-4 heteroatoms independently selected from nitrogen, oxygen, or sulfur.

[0282] Suitable substituents on the aliphatic group of R* include halogen, —R^{●}, -(haloR^{●}), —OH, —OR^{●}, —O(haloR^{●}), —CN, —C(O)OH, —C(O)OR^{●}, —NH2, —NHR^{●}, —NR^{●} 2, or —NO2, wherein each R^{●} is unsubstituted or where preceded by “halo” is substituted only with one or more halogens, and is independently C1-4 aliphatic, —CH2Ph, —O(CH2)0-1Ph, or a 5-6-membered saturated, partially unsaturated, or aryl ring having 0-4 heteroatoms independently selected from nitrogen, oxygen, or sulfur.

[0283] Suitable substituents on a substitutable nitrogen of an “optionally substituted” group include —R^{†}, —NR^{†} 2, —C(O)R^{†}, —C(O)OR^{†}, —C(O)C(O)R^{†}, —C(O)CH2C(O)R^{†}, —S(O)2R^{†}, —S(O)2NR^{†} 2, —C(S)NR^{†} 2, —C(NH)NRR^{†} 2, or —N(R^{†})S(O)2R^{†}; wherein each R^{†} is independently hydrogen, C1-6 aliphatic which may be substituted as defined below, unsubstituted —OPh, or an unsubstituted 5-6-membered saturated, partially unsaturated, or aryl ring having 0-4 heteroatoms independently selected from nitrogen, oxygen, or sulfur, or, notwithstanding the definition above, two independent occurrences of R^{†}, taken together with their intervening atom(s) form an unsubstituted 3-12-membered saturated, partially unsaturated, or aryl mono- or bicyclic ring having 0-4 heteroatoms independently selected from nitrogen, oxygen, or sulfur.

[0284] Suitable substituents on the aliphatic group of R^{†} are independently halogen, —R^{●}, -(haloR^{●}), —OH, —OR^{●}, —O(haloR^{●}), —CN, —C(O)OH, —C(O)OR^{●}, —NH2, —NHR^{●}, —NR^{●} 2, or —NO2, wherein each R^{●} is unsubstituted or where preceded by “halo” is substituted only with one or more halogens, and is independently C1-4 aliphatic, —CH2Ph, —O(CH2)0-1Ph, or a 5-6-membered saturated, partially unsaturated, or aryl ring having 0-4 heteroatoms independently selected from nitrogen, oxygen, or sulfur.

[0285] Heteroatoms such as nitrogen may have hydrogen substituents and/or any permissible substituents of organic compounds described herein which satisfy the valences of the heteroatoms. It is understood that “substitution” or “substituted” includes the implicit proviso that such substitution is in accordance with permitted valence of the substituted atom and the substituent, and that the substitution results in a stable compound, i.e., a compound that does not spontaneously undergo transformation, for example, by rearrangement, cyclization, or elimination.

[0286] In a broad aspect, the permissible substituents include acyclic and cyclic, branched and unbranched, carbocyclic and heterocyclic, aromatic and nonaromatic substituents of organic compounds. Illustrative substituents include, for example, those described herein. The permissible substituents can be one or more and the same or different for appropriate organic compounds. The heteroatoms such as nitrogen may have hydrogen substituents and/or any permissible substituents of organic compounds described herein which satisfy the valencies of the heteroatoms.

[0287] In various embodiments, the substituent is selected from alkoxy, aryloxy, alkyl, alkenyl, alkynyl, amide, amino, aryl, arylalkyl, carbamate, carboxy, cyano, cycloalkyl, ester, ether, formyl, halogen, haloalkyl, heteroaryl, heterocyclyl, hydroxyl, ketone, nitro, phosphate, sulfide, sulfinyl, sulfonyl, sulfonic acid, sulfonamide, and thioketone, each of which optionally is substituted with one or more suitable substituents. In some embodiments, the substituent is selected from alkoxy, aryloxy, alkyl, alkenyl, alkynyl, amide, amino, aryl, arylalkyl, carbamate, carboxy, cycloalkyl, ester, ether, formyl, haloalkyl, heteroaryl, heterocyclyl, ketone, phosphate, sulfide, sulfinyl, sulfonyl, sulfonic acid, sulfonamide, and thioketone, wherein each of the alkoxy, aryloxy, alkyl, alkenyl, alkynyl, amide, amino, aryl, arylalkyl, carbamate, carboxy, cycloalkyl, ester, ether, formyl, haloalkyl, heteroaryl, heterocyclyl, ketone, phosphate, sulfide, sulfinyl, sulfonyl, sulfonic acid, sulfonamide, and thioketone can be further substituted with one or more suitable substituents.

[0288] Examples of substituents include, but are not limited to, halogen, azide, alkyl, aralkyl, alkenyl, alkynyl, cycloalkyl, hydroxyl, alkoxyl, amino, nitro, sulfhydryl, imino, amido, phosphonate, phosphinate, carbonyl, carboxyl, silyl, ether, alkylthio, sulfonyl, sulfonamido, ketone, aldehyde, thioketone, ester, heterocyclyl, —CN, aryl, aryloxy, perhaloalkoxy, aralkoxy, heteroaryl, heteroaryloxy, heteroarylalkyl, heteroaralkoxy, azido, alkylthio, oxo, acylalkyl, carboxy esters, carboxamido, acyloxy, aminoalkyl, alkylaminoaryl, alkylaryl, alkylaminoalkyl, alkoxyaryl, arylamino, aralkylamino, alkylsulfonyl, carboxamidoalkylaryl, carboxamidoaryl, hydroxyalkyl, haloalkyl, alkylaminoalkylcarboxy, aminocarboxamidoalkyl, cyano, alkoxyalkyl, perhaloalkyl, arylalkyloxyalkyl, and the like. In some embodiments, the substituent is selected from cyano, halogen, hydroxyl, and nitro.

[0289] Throughout the disclosure, chemical substituents described in Markush structures are represented by variables. Where a variable is given multiple definitions as applied to different Markush formulas in different sections of the disclosure, it is to be understood that each definition should only apply to the applicable formula in the appropriate section of the disclosure.

### Abbreviations

[0290] As used herein, the following abbreviations and initialisms have the indicated meanings:

| | |
|---|---|
| MC3 | 4-(dimethylamino)-butanoic acid, (10Z,13Z)-1-(9Z,12Z)- |
| | 9,12-octadecadien-1-yl-10,13-nonadecadien-1-yl ester |
| DSPC | 1,2-distearoyl-sn-glycero-3-phosphocholine |
| DMG | 1,2-Dimyristoyl-rac-glycero-3-methanol |
| DOMG-PEG | R-3-[(ω-methoxy-poly(ethyleneglycol))carbamoyl)]- |
| | 1,2-dimyristyloxypropyl-3-amine |
| DLPE | 1,2-Dilauroyl-sn-Glycero-3-Phosphoethanolamine |
| DMPE | 1,2-Dimyristoyl-sn-Glycero-3-Phosphoethanolamine |
| DPPC | 1,2-dipalmitoyl-sn-glycero-3-phosphocholine |
| DSPE | 1,2-distearoyl-sn-glycero-3-phosphoethanolamine |
| DDAB | Didodecyldimethylammonium bromide |
| EPC | 1,2-dioleoyl-sn-glycero-3-ethylphosphocholine |
| 14PA | 1,2-dimyristoyl-sn-glycero-3-phosphate |
| 18BMP | bis(monooleoylglycero)phosphate |
| DODAP | 1,2-dioleoyl-3-dimethylammonium-propane |
| DOTAP | 1,2-dioleoyl-3-trimethylammonium-propane |
| C12-200 | 1,1′-((2-(4-(2-((2-(bis(2-hydroxydodecyl)amino)ethyl)(2- |
| | hydroxydodecyl)amino)ethyl)piperazin-1- |
| | yl)ethyl)azanediyl)bis(dodecan-2-ol) |

[0291] The details of one or more embodiments of the disclosure are set forth in the accompanying description below. Although any materials and methods similar or equivalent to those described herein can be used in the practice or testing of the present disclosure, the preferred materials and methods are now described. Other features, objects and advantages of the disclosure will be apparent from the description. In the description, the singular forms also include the plural unless the context clearly dictates otherwise. Unless defined otherwise, all technical and scientific terms used herein have the same meaning as commonly understood by one of ordinary skill in the art to which this disclosure belongs. In the case of conflict, the present description will control.

### C. Cas12a (or Cas Type V) Sequences

[0292] The present disclosure provides Cas12a (or Cas Type V) polypeptides and nucleic acid molecules encoding same for use in the Cas12a-based gene editing systems described herein for use in various applications, including precision gene editing in cells, tissues, organs, or organisms. In various embodiments, the Cas12a-based gene editing systems comprise (a) a Cas12a (or Cas Type V) polypeptide (or a nucleic acid molecule encoding a Cas12a (or Cas Type V) polypeptide) and (b) a Cas12a (or Cas Type V) guide RNA which is capable of associating with a Cas12a (or Cas Type V) polypeptide to form a complex such that the complex localizes to a target nucleic acid sequence (e.g., a genomic or plasmid target sequence) and binds thereto. In various embodiments, the Cas12a (or Cas Type V) polypeptide has a nuclease activity which results in the cutting of both strands of DNA.

[0293] As outlined in B. Paul, Biomedical Journal, Vol. 43, No. 1, February 2020 pages 8-17, the CRISPR-Cas systems are classified into two classes (Classes 1 and 2) that are subdivided into six types (types I through VI). Class 1 (types I, III and IV) systems use multiple Cas proteins in their CRISPR ribonucleoprotein effector nucleases and Class 2 systems (types II, V and VI) use a single Cas protein. Class 1 CRISPR-Cas systems are most commonly found in bacteria and archaea, and comprise ˜90% of all identified CRISPR-Cas loci. The Class 2 CRISPR-Cas systems, comprising the remaining ˜10%, exists almost exclusively in bacteria, and assemble a ribonucleoprotein complex, consisting of a CRISPR RNA (crRNA) and a Cas protein. The crRNA contains information to target a specific DNA sequence. These multidomain effector proteins achieve interference by complementarity between the crRNA and the target sequence after recognition of the PAM (Protospacer Adjacent Motif) sequence, which is adjacent to the target DNA. These ribonucleoprotein complexes have been redesigned for precise genome editing by providing a crRNA with a redesigned guide sequence, which is complementary to the sequence of the targeted DNA. The most widely characterized CRISPR-Cas system is the type II subtype II-A that is found in Streptococcus pyogenes (Sp), which uses the protein SpCas9, Cas9 was the first Cas-protein engineered for use in gene editing. Class 2 type V is further classified into 4 subtypes (V-A, V-B, V-C, V-U). At present, V-C and V-U remain widely uncharacterised and no structural information on these systems is available. V-A encodes the protein Cas12a (also known as Cpfl) and recently several high resolution structures of Cas12a have provided an insight into its working mechanism.

[0294] Type II (e.g., Cas9) and type V (e.g., Cas12a) CRISPR-Cas systems possess a characteristic Ruv-C like nuclease domain, which has been shown to be related to IS605 family transposon encoded TnpB proteins. Crystallographic and cryo-EM data reveal that Cas12a adopts a bilobed structure formed by the REC and Nuc lobes. The REC lobe is comprised of REC1 and REC2 domains, and the Nuc lobe is comprised of the RuvC, the PAM-interacting (PI) and the WED domains, and additionally, the bridge helix (BH). The RuvC endonuclease domain of this effector protein is made up of three discontinuous parts (RuvC The RNase site for processing its own crRNA is situated in the WED-III subdomain, and the DNase site is located in the interface between the RuvC and the Nuc domains. These structural studies have also shown that the only the 5′ repeat region of the crRNA is involved in the assembly of the binary complex. The 19/20 nt repeat region forms a pseudoknot structure through intramolecular base pairing. The crRNA is stabilized through interactions with the WED, RuvC and REC2 domains of the endonuclease, as well as two hydrated Mg2+ ions. This binary interference complex is then responsible for recognizing and degrading foreign DNA.

[0295] PAM recognition is a critical initial step in identifying a prospective DNA molecule for degradation since the PAM allows the CRISPR-Cas systems to distinguish their own genomic DNA from invading nucleic acids. Cas12a employs a multistep quality control mechanism to ensure the accurate and precise recognition of target spacer sequences. The WED REC1 and PAM-interacting domains are responsible for PAM recognition and for initiating the hybridization of the DNA target with the crRNA. After recognition of the dsDNA by WED and REC1 domains, the conserved loop-lysine helix-loop (LKL) region in the PI domain, containing three conserved lysines (K667, K671, K677 in FnCas12a), inserts the helix into the PAM duplex with assistance from two conserved prolines in the LKL region. Structural studies show the helix is inserted at an angle of 45° with respect to the dsDNA longitudinal axis, promoting the unwinding of the helical dsDNA. The critical positioning of the three conserved lysines on the dsDNA initiates the uncoupling of the Watson-Crick interaction between the base pairs of the dsDNA after the PAM. The target dsDNA unzipping allows the hybridization of the crRNA with the strand containing the PAM, the ‘target strand (TS), while the uncoupled DNA strand, non-target strand (NTS), is conducted towards the DNase site by the PAM-interacting domain. Cas12a has been shown to efficiently target spacer sequences following 5′T-rich PAM sequence. The PAM for LbCas12a and AsCas12a has a sequence of 5′-TTTN-3′ and for FnCas12a a sequence of 5′-TTN-3′ and is situated upstream of the 5′end of the non-target strand. It has also been shown that in addition to the canonical 5′-TTTN-3′ PAM, Cas12a also exhibits relaxed PAM recognition for suboptimal C-containing PAM sequences by forming altered interactions with the targeted DNA duplex.

[0296] Thus, Cas12a is another class II CRISPR/Cas system RNA-guided nuclease with similarities to Cas9 and may be used analogously. Unlike Cas9, Cas12a does not require a tracrRNA and only depends on a crRNA in its guide RNA, which provides the advantage that shorter guide RNAs can be used with Cas12a for targeting than Cas9. Cas12a is capable of cleaving either DNA or RNA. The PAM sites recognized by Cas12a have the sequences 5′-YTN-3′ (where “Y” is a pyrimidine and “N” is any nucleobase) or 5′-TTN-3′, in contrast to the G-rich PAM site recognized by Cas9. Cas12a cleavage of DNA produces double-stranded breaks with a sticky-ends having a 4 or 5 nucleotide overhang. For further discussion of Cas12a, see, e.g., Ledford et al. (2015) Nature. 526 (7571):17-17, Zetsche et al. (2015) Cell. 163 (3):759-771, Murovec et al. (2017) Plant Biotechnol. J. 15(8):917-926, Zhang et al. (2017) Front. Plant Sci. 8:177, Fernandes et al. (2016) Postepy Biochem. 62(3):315-326; herein incorporated by reference.

[0297] Any Cas12a (or Cas Type V) polypeptide or variant thereof may be used in the present disclosure, including those described in the herein tables and provided in the accompanying sequence listing.

[0298] In various embodiments, the Cas12a (or Cas Type V) polypeptide is a polypeptide selected from Table S15A (SEQ ID NO: 334 (No. ID405), SEQ ID NO: 58 (No. ID414), or SEQ ID NO: 564 (No. ID418), SEQ ID NO: 335 (No. ID406), SEQ ID NO: 331 (No. ID411), SEQ ID NO: 20 (No. ID415), and SEQ ID NO: 445 (No. ID419)), or a polypeptide having at least 70%, 75%, 80%, 85%, 90%, 95%, 99%, or 100% sequence identity with a polypeptide from Table S15A (SEQ ID NO: 334 (No. ID405), SEQ ID NO: 58 (No. ID414), or SEQ ID NO: 564 (No. ID418), SEQ ID NO: 335 (No. ID406), SEQ ID NO: 331 (No. ID411), SEQ ID NO: 20 (No. ID415), and SEQ ID NO: 445 (No. ID419)).

[0299] In various embodiments, the Cas12a (or Cas Type V) polypeptide is encoded by a polynucleotide sequence selected from Table S15B (SEQ ID NO: 365 (No. ID405), SEQ ID NO: 75 (No. ID414), or SEQ ID NO: 565 (No. ID418), SEQ ID NO: 366 (No. ID406), SEQ ID NO: 331 (No. ID411), SEQ ID NO: 30 (No. ID415), or SEQ ID NO: 445 (No. ID419)), or a polynucleotide having at least 70%, 75%, 80%, 85%, 90%, 95%, 99%, or 100% sequence identity with a polypeptide from Table S15B (SEQ ID NO: 365 (No. ID405), SEQ ID NO: 75 (No. ID414), or SEQ ID NO:565 (No. ID418), SEQ ID NO: 366 (No. ID406), SEQ ID NO: 331 (No. ID411), SEQ ID NO: 30 (No. ID415), or SEQ ID NO: 445 (No. ID419)).

[0300] Any Cas12a (or Cas Type V) polypeptide may be utilized with the compositions described herein. The Cas12a editing systems contemplated herein are not meant to be limiting in any way. The Cas12a editing systems disclosed herein may comprise a canonical or naturally-occurring Cas12a, or any ortholog Cas12a protein, or any variant Cas12a protein—including any naturally occurring variant, mutant, or otherwise engineered version of Cas12a—that is known or which can be made or evolved through a directed evolutionary or otherwise mutagenic process. In various embodiments, the Cas12a or Cas12a variants can have a nickase activity, i.e., only cleave of strand of the target DNA sequence. In other embodiments, the Cas12a or Cas12a variants have inactive nucleases, i.e., are “dead” Cas12a proteins. Other variant Cas12a proteins that may be used are those having a smaller molecular weight than the canonical Cas12a (e.g., for easier delivery) or having modified amino acid sequences or substitutions.

[0301] In various aspects, the present invention provides one or more modifications of Cas12a (or Cas Type V) polypeptides, including, for example, mutations to increase sufficiency and/or efficiency and modification of the Cas12a. In some embodiments, one or more domains of the Cas12a are modified, e.g., RuvC, REC, WED, BH, PI and NUC domains. In certain preferred embodiments, the modifications provide editing efficiency of greater than 10%, 20%, 30%, 40%, 50%, 60%, 70%, 80%, 90%, 95%, 99% relative to SpCas9. Even more preferably, the methods and compositions provide enhanced transduction efficiency and/or low cytotoxicity.

[0302] The Cas12a (or Cas Type V) gene editing systems and therapeutics described herein may comprise one or more nucleic acid components (e.g., a guide RNA or a coding RNA that encodes a component of the Cas12a system) which may be codon optimized.

[0303] For example, a nucleotide sequence (e.g., as part of an RNA payload) encoding a nucleobase editing system of the disclosure is codon optimized. Codon optimization methods are known in the art. For example, a protein encoding sequence of any one or more of the sequences provided herein may be codon optimized. Codon optimization, in some embodiments, may be used to match codon frequencies in target and host organisms to ensure proper folding; bias GC content to increase mRNA stability or reduce secondary structures; minimize tandem repeat codons or base runs that may impair gene construction or expression; customize transcriptional and translational control regions; insert or remove protein trafficking sequences; remove/add post translation modification sites in encoded protein (e.g., glycosylation sites); add, remove or shuffle protein domains; insert or delete restriction sites; modify ribosome binding sites and mRNA degradation sites; adjust translational rates to allow the various domains of the protein to fold properly; or reduce or eliminate problem secondary structures within the polynucleotide. Codon optimization tools, algorithms and services are known in the art—non-limiting examples include services from GeneArt (Life Technologies), DNA2.0 (Menlo Park Calif.) and/or proprietary methods. In some embodiments, the protein encoding sequence is optimized using optimization algorithms. In some embodiments, a codon optimized sequence shares less than 95% sequence identity to a naturally-occurring or wild-type sequence (e.g., a naturally-occurring or wild-type mRNA sequence encoding a nucleobase editing enzyme). In some embodiments, a codon optimized sequence shares less than 90% sequence identity to a naturally-occurring or wild-type sequence (e.g., a naturally-occurring or wild-type mRNA sequence encoding a nucleobase editing enzyme). In some embodiments, a codon optimized sequence shares less than 85% sequence identity to a naturally-occurring or wild-type sequence (e.g., a naturally-occurring or wild-type mRNA sequence encoding a nucleobase editing enzyme). In some embodiments, a codon optimized sequence shares less than 80% sequence identity to a naturally-occurring or wild-type sequence (e.g., a naturally-occurring or wild-type mRNA sequence encoding a nucleobase editing enzyme). In some embodiments, a codon optimized sequence shares less than 75% sequence identity to a naturally-occurring or wild-type sequence (e.g., a naturally-occurring or wild-type mRNA sequence encoding a nucleobase editing enzyme).

[0304] In some embodiments, a codon optimized sequence shares between 65% and 85% (e.g., between about 67% and about 85% or between about 67% and about 80%) sequence identity to a naturally-occurring or wild-type sequence (e.g., a naturally-occurring or wild-type mRNA sequence encoding a nucleobase editing enzyme). In some embodiments, a codon optimized sequence shares between 65% and 75% or about 80% sequence identity to a naturally-occurring or wild-type sequence (e.g., a naturally-occurring or wild-type mRNA sequence encoding a nucleobase editing enzyme).

[0305] When transfected into mammalian cells, the modified mRNA payloads have a stability of between 12-18 hours, or greater than 18 hours, e.g., 24, 36, 48, 60, 72, or greater than 72 hours.

[0306] In some embodiments, a codon optimized RNA may be one in which the levels of G/C are enhanced. The G/C-content of nucleic acid molecules (e.g., mRNA) may influence the stability of the RNA. RNA having an increased amount of guanine (G) and/or cytosine (C) residues may be functionally more stable than RNA containing a large amount of adenine (A) and thymine (T) or uracil (U) nucleotides. As an example, WO02/098443 discloses a pharmaceutical composition containing an mRNA stabilized by sequence modifications in the translated region. Due to the degeneracy of the genetic code, the modifications work by substituting existing codons for those that promote greater RNA stability without changing the resulting amino acid. The approach is limited to coding regions of the RNA.

### D. Cas12a (or Cas Type V) Guide RNA Sequences

### Cas12a (Cas Type V) Guide Sequences

[0307] The present disclosure further provides guide RNAs for use in accordance with the disclosed nucleic acid programmable DNA binding proteins (e.g., Cas12a) for use in methods of editing. The disclosure provides guide RNAs that are designed to recognize target sequences. Such gRNAs may be designed to have guide sequences (or “spacers”) having complementarity to a target sequence. Such gRNAs may be designed to have not only a guide sequences having complementarity to a target sequence to be edited, but also to have a backbone sequence that interacts specifically with the nucleic acid programmable DNA binding protein.

[0308] In various aspects, provided are one or more guide RNA sequences. In preferred embodiments, the gRNA is cleaved and processed into one or more intermediate crRNAs, which are subsequently processed into one or more mature crRNAs. In some embodiments, the gRNA comprises a precursor CRISPR RNAs (pre-crRNA) encoding one or more crRNAs or one or more intermediate or mature crRNAs, each guide RNA comprising at a minimum a repeat-spacer in the 5′ to 3′ direction, wherein the repeat comprises a stem-loop structure and the spacer comprises a DNA-targeting segment complementary to a target sequence in the targeted polynucleotide sequence. In certain embodiments, the gRNA is cleaved by a RNase activity of the Cas12a polypeptide into one or more mature crRNAs, each comprising at least one repeat and at least one spacer.

[0309] In other embodiments, one or more repeat-spacer directs the Cas12a (or Cas Type V) polypeptides to two or more distinct sites in the targeted polynucleotide sequence. Preferably, the gRNA is cleaved and processed into one or more intermediate crRNAs, which are subsequently processed into one or more mature crRNAs. More preferably, the pre-crRNA or intermediate crRNA are processed into mature crRNA by an Cas12a (or Cas Type V) polypeptide, and the mature crRNA becomes available for directing the Cas12a (or Cas Type V) endonuclease activity. In alternative embodiments, the gRNA is linked to a single or double strand DNA donor template, and the donor template is cleaved from the gRNA by the Cas12a (or Cas Type V) polypeptide. The donor polynucleotide template remains linked to gRNA while the Cas12a (or Cas Type V) polypeptide cleaves gRNA to liberate intermediate or mature crRNAs.

[0310] In exemplary embodiments, the Cas12a (or Cas Type V) system comprises one or more guide RNA comprising:
[0311] (a) one or more crRNA direct repeat sequences or a reverse complement selected from (Group 1) SEQ ID NO:7-12; (Group 2) SEQ ID NO:24-27; (Group 3) SEQ ID NO:36-39; (Group 4) SEQ ID NO:49-52; (Group 5) SEQ ID NO:63-68; (Group 6) SEQ ID NO:84-91; (Group 7) SEQ ID NO:106-111; (Group 8) SEQ ID NO:122-125; (Group 9) SEQ ID Nos:211-290; (Group 10) SEQ ID NO:343-354; (Group 11) SEQ ID NO:374-379; (Group 12) SEQ ID NO:390-393; (Group 13) SEQ ID NO:411-422; and (Group 14) SEQ ID NO:500-541;
[0312] (b) 20 to 35 nucleotides or up to the length of the crRNA from the 3′ end of the crRNA direct repeat sequences or a reverse complement (a) linked to a targeting guide attached to the 3′ end of the direct repeat sequence that is of 16-30 nucleotides in length;
[0313] (c) (Group 1) SEQ ID NO:13-15; (Group 2) SEQ ID NO:28-29; (Group 3) SEQ ID NO:40-41; (Group 4) SEQ ID NO:53-54; (Group 5) SEQ ID NO:69-71; (Group 6) SEQ ID NO:92-95; (Group 7) SEQ ID NO:112-114; (Group 8) SEQ ID NO:126-127; (Group 9) SEQ ID NO:291-330; (Group 10) SEQ ID NO:355-360; (Group 11) SEQ ID NO:380-382; (Group 12) SEQ ID NO:394-395; (Group 13) SEQ ID NO:423-428; and (Group 14) SEQ ID NO:542-563;
[0314] (d) a nucleic acid sequence that is a degenerate variant of (Group 1) SEQ ID NO:13-15; (Group 2) SEQ ID NO:28-29; (Group 3) SEQ ID NO:40-41; (Group 4) SEQ ID NO:53-54; (Group 5) SEQ ID NO:69-71; (Group 6) SEQ ID NO:92-95; (Group 7) SEQ ID NO:112-114; (Group 8) SEQ ID NO:126-127; (Group 9) SEQ ID NO:291-330; (Group 10) SEQ ID NO:355-360; (Group 11) SEQ ID NO:380-382; (Group 12) SEQ ID NO:394-395; (Group 13) SEQ ID NO:423-428; and (Group 14) SEQ ID NO:542-563;
[0315] (e) a nucleic acid sequence at least 70%, at least 71%, at least 72%, at least 73%, at least 74%, at least 75%, at least 76%, at least 77%, at least 78%, at least 79%, at least 80%, at least 81%, at least 82%, at least 83%, at least 84%, at least 85%, at least 90%, at least 95%, at least 98%, at least 99% or at least 99.9% identical to: (Group 1) SEQ ID NO:13-15; (Group 2) SEQ ID NO:28-29; (Group 3) SEQ ID NO:40-41; (Group 4) SEQ ID NO:53-54; (Group 5) SEQ ID NO:69-71; (Group 6) SEQ ID NO:92-95; (Group 7) SEQ ID NO:112-114; (Group 8) SEQ ID NO:126-127; (Group 9) SEQ ID NO:291-330; (Group 10) SEQ ID NO:355-360; (Group 11) SEQ ID NO:380-382; (Group 12) SEQ ID NO:394-395; (Group 13) SEQ ID NO:423-428; and (Group 14) SEQ ID NO:542-563; and
[0316] (f) a nucleic acid sequence that hybridizes under stringent conditions to: (Group 1) SEQ ID NO:13-15; (Group 2) SEQ ID NO:28-29; (Group 3) SEQ ID NO:40-41; (Group 4) SEQ ID NO:53-54; (Group 5) SEQ ID NO:69-71; (Group 6) SEQ ID NO:92-95; (Group 7) SEQ ID NO:112-114; (Group 8) SEQ ID NO:126-127; (Group 9) SEQ ID NO:291-330; (Group 10) SEQ ID NO:355-360; (Group 11) SEQ ID NO:380-382; (Group 12) SEQ ID NO:394-395; (Group 13) SEQ ID NO:423-428; and (Group 14) SEQ ID NO:542-563.

[0317] In preferred embodiments, the Cas12a (or Cas Type V) proteins target and cleave targeted polynucleotides that is complementary to a cognate guide RNA. In certain embodiments, the guide RNA comprises crRNA, which includes the natural CRISPR array. Such variants are derived from the first direct repeat, a “leader” sequence and involved in signaling or the direct repeat retains genetic diversity that doesn't affect functionality. The direct repeat is degenerate, generally near the 3′ end of the repeat array.

[0318] In various embodiments, the crRNA comprises about 15-40 nucleotides or direct repeat sequences comprising about 20-30 nucleotides. In exemplary embodiments, the direct repeat is selected from (Group 1) SEQ ID NO:7-12; (Group 2) SEQ ID NO:24-27; (Group 3) SEQ ID NO:36-39; (Group 4) SEQ ID NO:49-52; (Group 5) SEQ ID NO:63-68; (Group 6) SEQ ID NO:84-91; (Group 7) SEQ ID NO:106-111; (Group 8) SEQ ID NO:122-125; (Group 9) SEQ ID Nos:211-290; (Group 10) SEQ ID NO:343-354; (Group 11) SEQ ID NO:374-379; (Group 12) SEQ ID NO:390-393; (Group 13) SEQ ID NO:411-422; and (Group 14) SEQ ID NO:500-541. More preferably, the crRNA comprises a guide segment of 16-26 nucleotides or 20-24 nucleotides. Accordingly, in various embodiments, the crRNA of the Cas12a genome editing systems hybridizes to one or more targeted polynucleotide sequence. In certain preferred embodiments, the crRNA is 43-nucleotides. In other embodiments, the crRNA is made up of a 20-nucleotide 5′-handle and a 23-nucleotide leader sequence. In certain embodiments, the leader sequence comprises a seed region and 3′ termini, both of which are complementary to the target region in the genome Li, Bin et al. “Engineering CRISPR-Cpfl crRNAs and mRNAs to maximize genome editing efficiency.” Nature biomedical engineering vol. 1, 5 (2017): 0066. doi:10.1038/s41551-017-0066.

[0319] A single crRNA-guided endonuclease and has the ribonuclease activity to process its pre-crRNA into mature crRNA Zetsche, Bernd et al. “A Survey of Genome Editing Activity for 16 Cas12a Orthologs.” The Keio journal of medicine vol. 69, 3 (2020): 59-65. doi:10.2302/kjm.2019-0009-OA; Fonfara, Ines et al. “The CRISPR-associated DNA-cleaving enzyme Cpfl also processes precursor CRISPR RNA.” Nature vol. 532, 7600 (2016): 517-21. doi:10.1038/nature17945, which enables multiplex editing in a single crRNA transcript. Campa, Carlo C et al. “Multiplexed genome engineering by Cas12a and CRISPR arrays encoded on single transcripts.” Nature methods vol. 16, 9 (2019): 887-893. doi:10.1038/s41592-019-0508-6; Zetsche, Bernd et al. “Multiplex gene editing by CRISPR-Cpfl using a single crRNA array.” Nature biotechnology vol. 35, 1 (2017): 31-34. doi:10.1038/nbt.3737

[0320] Preferably, the crRNA-guided endonuclease provides alteration of numerous loci in host cell genomes.

[0321] More preferably, the Cas12a (or Cas Type V) comprises multiplexing performed using two methods. One method involves expressing many single gRNAs under different small RNA promoters either in same vector or in different vectors. Another method, multiple single gRNAs are fused with a tRNA recognition sequence, which are expressed as a single transcript under one promoter.

[0322] In some embodiments, the guide RNA may be 15-100 nucleotides in length and comprise a sequence of at least 10, at least 15, or at least 20 contiguous nucleotides that is complementary to a target nucleotide sequence. The guide RNA may comprise a spacer sequence of 15, 16, 17, 18, 19, 20, 21, 22, 23, 24, 25, 26, 27, 28, 29, 30, 31, 32, 33, 34, 35, 36, 37, 38, 39, or 40 contiguous nucleotides that is complementary to a target nucleotide sequence. In some cases, the guide sequence has a length in a range of from 17-30 nucleotides (nt) (e.g., from 17-25, 17-22, 17-20, 19-30, 19-25, 19-22, 19-20, 20-30, 20-25, or 20-22 nt). In some cases, the guide sequence has a length in a range of from 17-25 nucleotides (nt) (e.g., from 17-22, 17-20, 19-25, 19-22, 19-20, 20-25, or 20-22 nt). In some cases, the guide sequence has a length of 17 or more nt (e.g., 18 or more, 19 or more, 20 or more, 21 or more, or 22 or more nt; 19 nt, 20 nt, 21 nt, 22 nt, 23 nt, 24 nt, 25 nt, etc.). In some cases, the guide sequence has a length of 19 or more nt (e.g., 20 or more, 21 or more, or 22 or more nt; 19 nt, 20 nt, 21 nt, 22 nt, 23 nt, 24 nt, 25 nt, etc.). In some cases, the guide sequence has a length of 17 nt. In some cases, the guide sequence has a length of 18 nt. In some cases, the guide sequence has a length of 19 nt. In some cases, the guide sequence has a length of 20 nt. In some cases, the guide sequence has a length of 21 nt. In some cases, the guide sequence has a length of 22 nt. In some cases, the guide sequence has a length of 23 nt.

[0323] In some cases, the spacer sequence has a length of from 15 to 50 nucleotides (e.g., from 15 nucleotides (nt) to 20 nt, from 20 nt to 25 nt, from 25 nt to 30 nt, from 30 nt to 35 nt, from 35 nt to 40 nt, from 40 nt to 45 nt, or from 45 nt to 50 nt).

[0324] A subject guide RNA can interact with a target nucleic acid (e.g., double stranded DNA (dsDNA), single stranded DNA (ssDNA), single stranded RNA (ssRNA), or double stranded RNA (dsRNA)) in a sequence-specific manner via hybridization (i.e., base pairing).

[0325] The guide RNA can be modified to hybridize to any desired target sequence (e.g., while taking the PAM into account, e.g., when targeting a dsDNA target) within a target nucleic acid (e.g., a eukaryotic target nucleic acid such as genomic DNA). In some cases, the percent complementarity between the spacer sequence of the guide and the target site of the target nucleic acid is 60% or more (e.g., 65% or more, 70% or more, 75% or more, 80% or more, 85% or more, 90% or more, 95% or more, 97% or more, 98% or more, 99% or more, or 100%). In some cases, the percent complementarity between the spacer and the target site of the target nucleic acid is 80% or more (e.g., 85% or more, 90% or more, 95% or more, 97% or more, 98% or more, 99% or more, or 100%). In some cases, the percent complementarity between the spacer and the target site of the target nucleic acid is 90% or more (e.g., 95% or more, 97% or more, 98% or more, 99% or more, or 100%). In some cases, the percent complementarity between the spacer and the target site of the target nucleic acid is 100%.

[0326] In some cases, the percent complementarity between the spacer sequence and the target site of the target nucleic acid is 100% over an at least 5-nucleotide contiguous region of the spacer. In some cases, the percent complementarity between the guide sequence and the target site of the target nucleic acid over an at least 6-nucleotide contiguous region of the spacer is 60% or more (e.g., 70% or more, 75% or more, 80% or more, 85% or more, 90% or more, 95% or more, 97% or more, 98% or more, 99% or more, or 100%). In some cases, the percent complementarity between the guide sequence and the target site of the target nucleic acid over an at least 7-nucleotide contiguous region of the spacer is 60% or more (e.g., 70% or more, 75% or more, 80% or more, 85% or more, 90% or more, 95% or more, 97% or more, 98% or more, 99% or more, or 100%). In some cases, the percent complementarity between the guide sequence and the target site of the target nucleic acid over an at least 8-nucleotide contiguous region of the spacer is 60% or more (e.g., 70% or more, 75% or more, 80% or more, 85% or more, 90% or more, 95% or more, 97% or more, 98% or more, 99% or more, or 100%). In some cases, the percent complementarity between the guide sequence and the target site of the target nucleic acid over an at least 9-nucleotide contiguous region of the spacer is 60% or more (e.g., 70% or more, 75% or more, 80% or more, 85% or more, 90% or more, 95% or more, 97% or more, 98% or more, 99% or more, or 100%). In some cases, the percent complementarity between the guide sequence and the target site of the target nucleic acid over an at least 10-nucleotide contiguous region of the spacer is 60% or more (e.g., 70% or more, 75% or more, 80% or more, 85% or more, 90% or more, 95% or more, 97% or more, 98% or more, 99% or more, or 100%). In some cases, the percent complementarity between the guide sequence and the target site of the target nucleic acid over an at least 11-nucleotide contiguous region of the spacer is 60% or more (e.g., 70% or more, 75% or more, 80% or more, 85% or more, 90% or more, 95% or more, 97% or more, 98% or more, 99% or more, or 100%). In some cases, the percent complementarity between the guide sequence and the target site of the target nucleic acid over an at least 12-nucleotide contiguous region of the spacer is 60% or more (e.g., 70% or more, 75% or more, 80% or more, 85% or more, 90% or more, 95% or more, 97% or more, 98% or more, 99% or more, or 100%). In some cases, the percent complementarity between the guide sequence and the target site of the target nucleic acid over an at least 13-nucleotide contiguous region of the spacer is 60% or more (e.g., 70% or more, 75% or more, 80% or more, 85% or more, 90% or more, 95% or more, 97% or more, 98% or more, 99% or more, or 100%). In some cases, the percent complementarity between the guide sequence and the target site of the target nucleic acid over an at least 14-nucleotide contiguous region of the spacer is 60% or more (e.g., 70% or more, 75% or more, 80% or more, 85% or more, 90% or more, 95% or more, 97% or more, 98% or more, 99% or more, or 100%). In some cases, the percent complementarity between the guide sequence and the target site of the target nucleic acid over an at least 15-nucleotide contiguous region of the spacer is 60% or more (e.g., 70% or more, 75% or more, 80% or more, 85% or more, 90% or more, 95% or more, 97% or more, 98% or more, 99% or more, or 100%). In some cases, the percent complementarity between the guide sequence and the target site of the target nucleic acid over an at least 16-nucleotide contiguous region of the spacer is 60% or more (e.g., 70% or more, 75% or more, 80% or more, 85% or more, 90% or more, 95% or more, 97% or more, 98% or more, 99% or more, or 100%). In some cases, the percent complementarity between the guide sequence and the target site of the target nucleic acid over an at least 17-nucleotide contiguous region of the spacer is 60% or more (e.g., 70% or more, 75% or more, 80% or more, 85% or more, 90% or more, 95% or more, 97% or more, 98% or more, 99% or more, or 100%). In some cases, the percent complementarity between the guide sequence and the target site of the target nucleic acid over an at least 18-nucleotide contiguous region of the spacer is 60% or more (e.g., 70% or more, 75% or more, 80% or more, 85% or more, 90% or more, 95% or more, 97% or more, 98% or more, 99% or more, or 100%). In some cases, the percent complementarity between the guide sequence and the target site of the target nucleic acid over an at least 19-nucleotide contiguous region of the spacer is 60% or more (e.g., 70% or more, 75% or more, 80% or more, 85% or more, 90% or more, 95% or more, 97% or more, 98% or more, 99% or more, or 100%). In some cases, the percent complementarity between the guide sequence and the target site of the target nucleic acid over an at least 20-nucleotide contiguous region of the spacer is 60% or more (e.g., 70% or more, 75% or more, 80% or more, 85% or more, 90% or more, 95% or more, 97% or more, 98% or more, 99% or more, or 100%). In some cases, the percent complementarity between the guide sequence and the target site of the target nucleic acid over an at least 21-nucleotide contiguous region of the spacer is 60% or more (e.g., 70% or more, 75% or more, 80% or more, 85% or more, 90% or more, 95% or more, 97% or more, 98% or more, 99% or more, or 100%). In some cases, the percent complementarity between the guide sequence and the target site of the target nucleic acid over an at least 22-nucleotide contiguous region of the spacer is 60% or more (e.g., 70% or more, 75% or more, 80% or more, 85% or more, 90% or more, 95% or more, 97% or more, 98% or more, 99% or more, or 100%).

[0327] In some cases, the percent complementarity between the spacer sequence and the target site of the target nucleic acid is 100% over an at least 5-10 nucleotide contiguous region of the spacer. In some cases, the percent complementarity between the guide sequence and the target site of the target nucleic acid over an at least 6-11 nucleotide contiguous region of the spacer is 60% or more (e.g., 70% or more, 75% or more, 80% or more, 85% or more, 90% or more, 95% or more, 97% or more, 98% or more, 99% or more, or 100%). In some cases, the percent complementarity between the guide sequence and the target site of the target nucleic acid over an at least 7-12 nucleotide contiguous region of the spacer is 60% or more (e.g., 70% or more, 75% or more, 80% or more, 85% or more, 90% or more, 95% or more, 97% or more, 98% or more, 99% or more, or 100%). In some cases, the percent complementarity between the guide sequence and the target site of the target nucleic acid over an at least 8-13 nucleotide contiguous region of the spacer is 60% or more (e.g., 70% or more, 75% or more, 80% or more, 85% or more, 90% or more, 95% or more, 97% or more, 98% or more, 99% or more, or 100%). In some cases, the percent complementarity between the guide sequence and the target site of the target nucleic acid over an at least 9-14 nucleotide contiguous region of the spacer is 60% or more (e.g., 70% or more, 75% or more, 80% or more, 85% or more, 90% or more, 95% or more, 97% or more, 98% or more, 99% or more, or 100%). In some cases, the percent complementarity between the guide sequence and the target site of the target nucleic acid over an at least 10-15 nucleotide contiguous region of the spacer is 60% or more (e.g., 70% or more, 75% or more, 80% or more, 85% or more, 90% or more, 95% or more, 97% or more, 98% or more, 99% or more, or 100%). In some cases, the percent complementarity between the guide sequence and the target site of the target nucleic acid over an at least 11-16 nucleotide contiguous region of the spacer is 60% or more (e.g., 70% or more, 75% or more, 80% or more, 85% or more, 90% or more, 95% or more, 97% or more, 98% or more, 99% or more, or 100%). In some cases, the percent complementarity between the guide sequence and the target site of the target nucleic acid over an at least 12-17 nucleotide contiguous region of the spacer is 60% or more (e.g., 70% or more, 75% or more, 80% or more, 85% or more, 90% or more, 95% or more, 97% or more, 98% or more, 99% or more, or 100%). In some cases, the percent complementarity between the guide sequence and the target site of the target nucleic acid over an at least 13-18 nucleotide contiguous region of the spacer is 60% or more (e.g., 70% or more, 75% or more, 80% or more, 85% or more, 90% or more, 95% or more, 97% or more, 98% or more, 99% or more, or 100%). In some cases, the percent complementarity between the guide sequence and the target site of the target nucleic acid over an at least 14-19 nucleotide contiguous region of the spacer is 60% or more (e.g., 70% or more, 75% or more, 80% or more, 85% or more, 90% or more, 95% or more, 97% or more, 98% or more, 99% or more, or 100%). In some cases, the percent complementarity between the guide sequence and the target site of the target nucleic acid over an at least nucleotide contiguous region of the spacer is 60% or more (e.g., 70% or more, 75% or more, 80% or more, 85% or more, 90% or more, 95% or more, 97% or more, 98% or more, 99% or more, or 100%). In some cases, the percent complementarity between the guide sequence and the target site of the target nucleic acid over an at least 16-21 nucleotide contiguous region of the spacer is 60% or more (e.g., 70% or more, 75% or more, 80% or more, 85% or more, 90% or more, 95% or more, 97% or more, 98% or more, 99% or more, or 100%). In some cases, the percent complementarity between the guide sequence and the target site of the target nucleic acid over an at least 17-22 nucleotide contiguous region of the spacer is 60% or more (e.g., 70% or more, 75% or more, 80% or more, 85% or more, 90% or more, 95% or more, 97% or more, 98% or more, 99% or more, or 100%). In some cases, the percent complementarity between the guide sequence and the target site of the target nucleic acid over an at least 18-23 nucleotide contiguous region of the spacer is 60% or more (e.g., 70% or more, 75% or more, 80% or more, 85% or more, 90% or more, 95% or more, 97% or more, 98% or more, 99% or more, or 100%). In some cases, the percent complementarity between the guide sequence and the target site of the target nucleic acid over an at least 19-24 nucleotide contiguous region of the spacer is 60% or more (e.g., 70% or more, 75% or more, 80% or more, 85% or more, 90% or more, 95% or more, 97% or more, 98% or more, 99% or more, or 100%). In some cases, the percent complementarity between the guide sequence and the target site of the target nucleic acid over an at least 20-25 nucleotide contiguous region of the spacer is 60% or more (e.g., 70% or more, 75% or more, 80% or more, 85% or more, 90% or more, 95% or more, 97% or more, 98% or more, 99% or more, or 100%). In some cases, the percent complementarity between the guide sequence and the target site of the target nucleic acid over an at least 21-26 nucleotide contiguous region of the spacer is 60% or more (e.g., 70% or more, 75% or more, 80% or more, 85% or more, 90% or more, 95% or more, 97% or more, 98% or more, 99% or more, or 100%). In some cases, the percent complementarity between the guide sequence and the target site of the target nucleic acid over an at least 22-27 nucleotide contiguous region of the spacer is 60% or more (e.g., 70% or more, 75% or more, 80% or more, 85% or more, 90% or more, 95% or more, 97% or more, 98% or more, 99% or more, or 100%).

[0328] In various embodiments, the guide RNAs may have a scaffold or core region that complexes with a cognate nucleic acid programmable DNA binding protein (e.g., CRISPR Cas9 or Cas12a). In some cases, a guide scaffold can have two stretches of nucleotides that are complementary to one another and hybridize to form a double stranded RNA duplex (dsRNA duplex). Thus, in some cases, the protein binding segment of a guide RNA includes a dsRNA duplex. In some embodiments, the dsRNA duplex region includes a range of from 5-25 base pairs (bp) (e.g., from 5-22, 5-20, 5-18, 5-15, 5-12, 5-10, 5-8, 8-8-22, 8-18, 8-15, 8-12, 12-25, 12-22, 12-18, 12-15, 13-25, 13-22, 13-18, 13-15, 14-25, 14-22, 14-18, 14-15, 15-25, 15-22, 15-18, 17-25, 17-22, or 17-18 bp, e.g., 5 bp, 6 bp, 7 bp, 8 bp, 9 bp, 10 bp, etc.). In some cases, the dsRNA duplex region includes a range of from 6-15 base pairs (bp) (e.g., from 6-12, 6- or 6-8 bp, e.g., 6 bp, 7 bp, 8 bp, 9 bp, 10 bp, etc.). In some cases, the duplex region includes 5 or more bp (e.g., 6 or more, 7 or more, or 8 or more bp). In some cases, the duplex region includes 6 or more bp (e.g., 7 or more, or 8 or more bp). In some cases, not all nucleotides of the duplex region are paired, and therefore the duplex forming region can include a bulge. The term “bulge” herein is used to mean a stretch of nucleotides (which can be one nucleotide) that do not contribute to a double stranded duplex, but which are surround 5′ and 3′ by nucleotides that do contribute, and as such a bulge is considered part of the duplex region. In some cases, the dsRNA includes 1 or more bulges (e.g., 2 or more, 3 or more, 4 or more bulges). In some cases, the dsRNA duplex includes 2 or more bulges (e.g., 3 or more, 4 or more bulges). In some cases, the dsRNA duplex includes 1-5 bulges (e.g., 1-4, 1-3, 2-5, 2-4, or 2-3 bulges).

[0329] Thus, in some cases, the stretches of nucleotides that hybridize to one another to form the dsRNA duplex in a guide scaffold region have 70%-100% complementarity (e.g., 75%-100%, 80%-10%, 85%-100%, 90%-100%, 95%-100% complementarity) with one another. In some cases, the stretches of nucleotides that hybridize to one another to form the dsRNA duplex have 70%400% complementarity (e.g., 75%-100%, 80%-10%, 85%-100%, 90%-100%, 95%-100% complementarity) with one another. In some cases, the stretches of nucleotides that hybridize to one another to form the dsRNA duplex have 85%-100% complementarity (e.g., 90%-100%, 95%-100% complementarity) with one another. In some cases, the stretches of nucleotides that hybridize to one another to form the dsRNA duplex have 70%-95% complementarity (e.g., 75%-95%, 80%-95%, 85%-95%, 90%-95% complementarity) with one another. In other words, in some cases, the dsRNA duplex includes two stretches of nucleotides that have 70%-100% complementarity (e.g., 75%-100%, 80%-10%, 85%-100%, 90%-100%, 95%-100% complementarity) with one another. In some cases, the dsRNA duplex includes two stretches of nucleotides that have 85%-100% complementarity (e.g., 90%-100%, 95%-100% complementarity) with one another. In some cases, the dsRNA duplex includes two stretches of nucleotides that have 70%-95% complementarity (e.g., 75%-95%, 80%-95%, 85%-95%, 90%-95% complementarity) with one another.

[0330] In various embodiments, the scaffold region of a guide RNA can also include one or more (1, 2, 3, 4, 5, etc.) mutations relative to a naturally occurring scaffold region. For example, in some cases a base pair can be maintained while the nucleotides contributing to the base pair from each segment can be different. In some cases, the duplex region of a subject guide RNA includes more paired bases, less paired bases, a smaller bulge, a larger bulge, fewer bulges, more bulges, or any convenient combination thereof, as compared to a naturally occurring duplex region (of a naturally occurring guide RNA).

[0331] Examples of various guide RNAs can be found in the art, and in some cases variations similar to those introduced into Cas9 guide RNAs can also be introduced into guide RNAs of the present disclosure (e.g., mutations to the dsRNA duplex region, extension of the 5′ or 3′ end for added stability for to provide for interaction with another protein, and the like). For example, see Jinek et al., Science. 2012 Aug. 17; 337(6096):816-21; Chylinski et al., RNA Biol. 2013 May; 10(5):726-37; Ma et al., Biomed Res Int. 2013; 2013:270805; Hou et al., Proc Natl Acad Sci USA. 2013 Sep. 24; 110(39):15644-9; Jinek et al., Elife. 2013; 2:e00471; Pattanayak et al., Nat Biotechnol. 2013 September; 31(9):839-43; Qi et al, Cell. 2013 Feb. 28; 152(5): 1173-83; Wang et al., Cell. 2013 May 9; 153(4):910-8; Auer et al., Genome Res. 2013 Oct. 31; Chen et al., Nucleic Acids Res. 2013 Nov. 1; 41(20):e19; Cheng et al., Cell Res. 2013 October; 23(10):1163-71; Cho et al., Genetics. 2013 November; 195(3):1177-80; DiCarlo et al., Nucleic Acids Res. 2013 April; 41(7):4336-43; Dickinson et al., Nat Methods. 2013 October; 10(10):1028-34; Ebina et al., Sci Rep. 2013; 3:2510; Fujii et. al, Nucleic Acids Res. 2013 Nov. 1; 41(20):e187; Hu et al., Cell Res. 2013 November; 23(10:1322-5; Jiang et al., Nucleic Acids Res. 2013 Nov. 1; 41(20):e188; Larson et al., Nat Protoc. 2013 November; 8(11):2180-96; Mali et. at., Nat Methods. 2013 October; 10(10):957-63; Nakayama et al., Genesis. 2013 December; 51(12):835-43; Ran et al., Nat Protoc. 2013 November; 8(11):2281-308; Ran et al., Cell. 2013 Sep. 12; 154(6):1380-9; Upadhyay et al., G3 (Bethesda). 2013 Dec. 9; 3(12):2233-8; Walsh et al., Proc Natl Acad Sci USA. 2013 Sep. 24; 110(39):15514-5; Xie et al., Mol Plant. 2013 Oct. 9; Yang et al., Cell. 2013 Sep. 12; 154(6):1370-9; Briner et al., Mol Cell. 2014 Oct. 23; 56(2):333-9; and U.S. patents and patent applications: U.S. Pat. Nos. 8,906,616; 8,895,308; 8,889,418; 8,889,356; 8,871,445; 8,865,406; 8,795,965; 8,771,945; 8,697,359; 20140068797; 20140170753; 20140179006; 20140179770; 20140186843; 20140186919; 20140186958; 20140189896; 20140227787; 20140234972; 20140242664; 20140242699; 20140242700; 20140242702; 20140248702; 20140256046; 20140273037; 20140273226; 20140273230; 20140273231; 20140273232; 20140273233; 20140273234; 20140273235; 20140287938; 20140295556; 20140295557; 20140298547; 20140304853; 20140309487; 20140310828; 20140310830; 20140315985; 20140335063; 20140335620; 20140342456; 20140342457; 20140342458; 20140349400; 20140349405; 20140356867; 20140356956; 20140356958; 20140356959; 20140357523; 20140357530; 20140364333; and 20140377868; all of which are hereby incorporated by reference in their entirety.

### Guide RNA Modifications

[0332] In one embodiment, the guide RNAs contemplated herein comprise non-naturally occurring nucleic acids and/or non-naturally occurring nucleotides and/or nucleotide analogs, and/or chemical modifications. Non-naturally occurring nucleic acids can include, for example, mixtures of naturally and non-naturally occurring nucleotides. Non-naturally occurring nucleotides and/or nucleotide analogs may be modified at the ribose, phosphate, and/or base moiety. In an embodiment of the invention, a guide RNA component nucleic acid comprises ribonucleotides and non-ribonucleotides. In one such embodiment, a guide RNA component comprises one or more ribonucleotides and one or more deoxyribonucleotides. In an embodiment of the invention, the guide RNA (including pegRNA) component comprises one or more non-naturally occurring nucleotide or nucleotide analog such as a nucleotide with phosphorothioate linkage, a locked nucleic acid (LNA) nucleotides comprising a methylene bridge between the 2′ and 4′ carbons of the ribose ring, or bridged nucleic acids (BNA).

[0333] Other examples of modified nucleotides include 2′-O-methyl analogs, 2′-deoxy analogs, or 2′-fluoro analogs. Further examples of modified bases include, but are not limited to, 2-aminopurine, 5-bromo-uridine, pseudouridine, inosine, 7-methylguanosine. Examples of coRNA chemical modifications include, without limitation, incorporation of 2′-O-methyl (M), 2′-O-methyl 3′phosphorothioate (MS), S-constrained ethyl(cEt), or 2′-O-methyl 3 ‘thioPACE (MSP) at one or more terminal nucleotides. Such chemically modified oRNA components can comprise increased stability and increased activity as compared to unmodified oRNA components, though on-target vs. off-target specificity is not predictable. (See, Hendel, 2015, Nat Biotechnol. 33(9):985-9, doi: 10.1038/nbt.3290, published online 29 Jun. 2015 Ragdarm et al., 0215, PNAS, E7110-E7111; Allerson et al., J. Med. Chem. 2005, 48:901-904; Bramsen et al., Front. Genet., 2012, 3:154; Deng et al., PNAS, 2015, 112: 11870-11875; Sharma et al., MedChemComm., 2014, 5: 1454-1471; Hendel et al., Nat. Biotechnol. (2015) 33(9): 985-989; Li et al., Nature Biomedical Engineering, 2017, 1, 0066 D01: 10.1038/s41551-017-0066). In one embodiment, the 5′ and/or 3’ end of a guide RNA (including pegRNA) component is modified by a variety of functional moieties including fluorescent dyes, polyethylene glycol, cholesterol, proteins, or detection tags. (See Kelly et al., 2016, J. Biotech. 233:74-83). In one embodiment, a guide RNA (including pegRNA) component comprises ribonucleotides in a region that binds to a target sequence and one or more deoxyribonucletides and/or nucleotide analogs in a region that binds to a nucleic acid programmable DNA binding protein (e.g., Cas9 nickase).

[0334] In an embodiment, deoxyribonucleotides and/or nucleotide analogs are incorporated in engineered guide RNA component structures. In one embodiment, 3-5 nucleotides at either the 3′ or the 5′ end of a guide RNA component is chemically modified. In one embodiment, only minor modifications are introduced in the seed region, such as 2′-F modifications. In one embodiment, 2′-F modification is introduced at the 3′ end of a guide RNA component. In one embodiment, three to five nucleotides at the 5′ and/or the 3′ end of the reRNA component are chemically modified with 2′-O-methyl (M), 2′-O-methyl 3′ phosphorothioate (MS), S-constrained ethyl(cEt), or 2′-O-methyl 3′ thioPACE (MSP). Such modification can enhance genome editing efficiency (see Hendel et al., Nat. Biotechnol. (2015) 33(9): 985-989). In one embodiment, all of the phosphodiester bonds of a guide RNA (including pegRNA) component are substituted with phosphorothioates (PS) for enhancing levels of gene disruption. In one embodiment, more than five nucleotides at the 5′ and/or the 3′ end of the guide RNA (including pegRNA) component are chemically modified with 2′-O-Me, 2′-F or S-constrained ethyl(cEt). Such chemically modified guide RNA (including pegRNA) component can mediate enhanced levels of gene disruption (see Ragdarm et al., 0215, PNAS, E7110-E7111). In an embodiment of the invention, a guide RNA (including pegRNA) component is modified to comprise a chemical moiety at its 3′ and/or 5′ end. Such moieties include, but are not limited to amine, azide, alkyne, thio, dibenzocyclooctyne (DBCO), or Rhodamine. In certain embodiment, the chemical moiety is conjugated to the guide RNA (including pegRNA) component by a linker, such as an alkyl chain. In one embodiment, the chemical moiety of the modified nucleic acid component can be used to attach the guide RNA (including pegRNA) component to another molecule, such as DNA, RNA, protein, or nanoparticles. Such chemically modified guide RNA (including pegRNA) component can be used to identify or enrich cells generically edited by a gene editing system described herein.

[0335] Other guide RNA modifications are described in Kim, D. Y., Lee, J. M., Moon, S. B. et al. Efficient CRISPR editing with a hypercompact Cas12f1 and engineered guide RNAs delivered by adeno-associated virus. Nat Biotechnol 40, 94-102 (2022).

[0336] Accordingly, in various aspects of the invention, the guide RNA are modified in one or more locations within the molecule. MS1, an internal penta(uridinylate) (UUUUU) sequence in the tracrRNA; MS2, the 3′ terminus of the crRNA; MS3, the ‘stem 1’ region of the tracrRNA; MS4, the tracrRNA-crRNA complementary region; and MS5, the ‘stem 2’ region of the tracrRNA.

[0337] Various aspects of the invention provide methods and compositions for improved guide RNA stability via chemical modifications. Braasch, D. A., Jensen, S., Liu, Y., Kaur, K., Arar, K., White, M. A., et al. (2003). RNA interference in mammalian cells by chemically-modified RNA. Biochemistry 42, 7967-7975. doi: 10.1021/bi0343774. Chiu, Y. L., and Rana, T. M. (2003). siRNA function in RNAi: a chemical modification analysis. RNA 9, 1034-1048. doi: 10.1261/rna.5103703. Behlke, M. A. (2008). Chemical modification of siRNAs for in vivo use. Oligonucleotides 18, 305-319. doi: 10.1089/oli.2008.0164. Bennett, C. F., and Swayze, E. E. (2010). RNA targeting therapeutics: molecular mechanisms of antisense oligonucleotides as a therapeutic platform. Annu. Rev. Pharmacol. Toxicol. 50, 259-293. doi: 10.1146/annurev.pharmtox.010909.105654. Deleavey, G. F., and Damha, M. J. (2012). Designing chemically modified oligonucleotides for targeted gene silencing. Chem. Biol. 19, 937-954. doi: 10.1016/j.chembiol.2012.07.011. Lennox, K. A., and Behlke, M. A. (2020). Chemical modifications in RNA interference and CRISPR/Cas genome editing reagents. Methods Mol. Biol. 2115, 23-55. doi: 10.1007/978-1-0716-0290-4_2.

[0338] For instance, Hendel et al. improved guide RNA stability by chemically modifying gRNA ends to reduce degradation by exonucleases, RNA nuclease. Hendel, A., Bak, R. O., Clark, J. T., Kennedy, A. B., Ryan, D. E., Roy, S., et al. (2015a). Chemically modified guide RNAs enhance CRISPR-Cas genome editing in human primary cells. Nat. Biotechnol. 33, 985-989. doi: 10.1038/nbt.3290. Chemical modifications of gRNAs may enable more efficient and safer gene-editing in primary cells suitable for clinical applications.

[0339] A review of types of chemical modifications are provided in the table below. Allen, Daniel et al. “Using Synthetically Engineered Guide RNAs to Enhance CRISPR Genome Editing Systems in Mammalian Cells.” Frontiers in genome editing vol. 2 617910. 28 Jan. 2021, doi:10.3389/fgeed.2020.617910.

| | | Effect on genome | |
|---|---|---|---|
| Modification(s) | Modification location | editing efficiency | References |
| M | Terminal residues | ↑ [symbol] | [symbol] |
| MS | Terminal residues | ↑ [symbol] | [symbol] |
| | Spacer (PAM-distal | ↑ [symbol] | [symbol] |
| | region) | | |
| | Spacer (tracrRNA- | ↑ [symbol] | [symbol] |
| | binding region) | | |
| | Spacer (Seed region) | ↓ | [symbol] |
| MSP | Terminal residues | ↑ [symbol] | [symbol] |
| cEt | Spacer (PAM-distal | ↑ | [symbol] |
| | region) | | |
| | Spacer (tracrRNA- | ↑ | [symbol] |
| | binding region) | | |
| | Spacer (Seed region) | ↓ | [symbol] |
| 2′-F | Spacer (PAM-distal | ↑ | [symbol] |
| | region) | | |
| | Spacer (tracrRNA- | ↑ | [symbol] |
| | gbinding region) | | |
| | Spacer (Seed region) | ↓ | [symbol] |
| 2′-F +PS | Spacer (PAM-distal | ↑ | [symbol] |
| | region) | | |
| | Spacer (tracrRNA- | ↑ | [symbol] |
| | binding region) | | |
| | Spacer (Seed region) | ↓ | [symbol] |
| | Spacer (Seed region, | ↑ [symbol] | [symbol] |
| | Cas9-non-interacting | | |
| | residues) | | |
| PS | Whole crRNA | ↑ | [symbol] |

[symbol]

additionally validated in vivo [symbol] [symbol]
additionally validated in human primary [symbol]
2′-O-methyl (M or 2′-O- [symbol] 2′-O-methyl 3′ phosphoroth [symbol] (MS: 2′-O-methyl-3′-thioPACE (MSP): S-con [symbol] ethyl (c [symbol] : 2′-fluoro ( [symbol] and phos [symbol] (PS). [symbol]
indicates data missing or illegible when filed

[0340] Accordingly, in various embodiments of the present invention, the genome editing system comprising a guide RNA and further comprises one or more chemical modifications selected from, but not limited to the modifications in the above table.

[0341] In exemplary embodiments, chemical modifications to the guide RNA (including pegRNA) include modifications on the ribose rings and phosphate backbone of guide RNA (including pegRNA) and modifications at the 2′OH include 2′-O-Me, 2′-F, and 2′F-ANA. More extensive ribose modifications include 2′F-4′-Cα-OMe and 2′,4′-di-Cα-OMe combine modification at both the 2′ and 4′ carbons. Phosphodiester modifications include sulfide-based Phosphorothioate (PS) or acetate-based phosphonoacetate alterations. Combinations of the ribose and phosphodiester modifications have given way to formulations such as 2′-O-methyl 3′phosphorothioate (MS), or 2′-O-methyl-3′-thioPACE (MSP), and 2′-O-methyl-3′-phosphonoacetate (MP) RNAs. Locked and unlocked nucleotides such as locked nucleic acid (LNA), bridged nucleic acids (BNA), S-constrained ethyl (cEt), and unlocked nucleic acid (UNA) are examples of sterically hindered nucleotide modifications. Modifications to make a phosphodiester bond between the 2′ and 5′ carbons (2′,5′-RNA) of adjacent RNAs as well as a butane 4-carbon chain link between adjacent RNAs have been described.

[0342] In certain embodiments, the guide RNA comprises one or more hairpins as depicted in the appended Drawings. Preferably, the guide RNA comprises 0-10 hairpins. In some embodiments, the guide RNA comprises 1-3 hairpins. In some embodiments, the guide RNA comprises 2 hairpins. More preferably, a hairpin comprises 6-20 ribonucleotides.

[0343] Modification of the sgRNA is also an efficient way of enhancing the efficiency of the CRISPR-Cas systems. Kim, Daesik et al. “Evaluating and Enhancing Target Specificity of Gene-Editing Nucleases and Deaminases.” Annual review of biochemistry vol. 88 (2019): 191-220. doi:10.1146/annurev-biochem-013118-111730. For instance, adding a “U4AU6” motif at the end of the crRNA Bin Moon, Su et al. “Highly efficient genome editing by CRISPR-Cpfl using CRISPR RNA with a uridinylate-rich 3′-overhang.” Nature communications vol. 9, 1 3651. 7 Sep. 2018, doi:10.1038/s41467-018-06129-w or using a pol-II-driven truncated pre-tRNA Zhang, Xuhua et al. “Genetic editing and interrogation with Cpfl and caged truncated pre-tRNA-like crRNA in mammalian cells.” Cell discovery vol. 4 36. 10 Jul. 2018, doi:10.1038/s41421-018-0035-0 have been demonstrated.

[0344] Accordingly, various embodiments provide for the modification of the sgRNA to enhance the efficiency of the CRISPR-Cas12a systems and modifications to express the crRNA to improve the activity of the CRISPR-Cas12a system.

[0345] Additional embodiments provide guide RNA modifications including but not limited to one or more chemical modifications selected from 2′-O-Me, 2′-F, and 2′F-ANA at 2′OH; 2′F-4′-Cα-OMe and 2′,4′-di-Cα-OMe at 2′ and 4′ carbons; phosphodiester modifications comprising sulfide-based Phosphorothioate (PS) or acetate-based phosphonoacetate alterations; combinations of the ribose and phosphodiester modifications; locked nucleic acid (LNA), bridged nucleic acids (BNA), S-constrained ethyl (cEt), and unlocked nucleic acid (UNA); modifications to produce a phosphodiester bond between the 2′ and 5′ carbons (2′,5′-RNA) of adjacent RNAs; and a butane 4-carbon chain link between adjacent RNAs.

[0346] In still other embodiments, the guide RNAs disclosed herein may be modified by introducing additional RNA motifs into the guide RNAs, e.g., at the 5′ and 3′ termini of the guide RNAs. Such structures may include, but are not limited to RNA hairpins, RNA step-loops, RNA quadruplexes, cap structures, and poly(A) tails, or ribozyme functions and the like. Also, guide RNAs could also be modified to include one or more nuclear localization sequences.

[0347] Additional RNA motifs could also improve function or stability of the guide RNAs. Addition of dimerization motifs—such as kissing loops or a GNRA tetraloop/tetraloop receptor pair—at the 5′ and 3′ termini of the guide RNAs could also result in effective circularization of the guide RNAs, improving stability. Additionally, it is envisioned that addition of these motifs could enable the physical separation of guide RNA components, e.g., separation of the Cas12a binding region from the spacer sequence. Short 5′ extensions or 3′ extensions to the guide RNAs that form a small toehold hairpin at either or both ends of the guide RNAs could also compete favorably against the annealing of intracomplementary regions along the length of the guide RNAs. Finally, kissing loops could also be used to recruit other RNAs or proteins to the genomic site targeted by the guide RNA.

[0348] Guide RNAs could be further improved via directed evolution, in an analogous fashion to how protein function can be improved. Directed evolution could enhance guide RNA function and/or reduce off-site targeting and/or indels and/or improve precise editing efficiency.

[0349] The present disclosure contemplates any such ways to further improve the stability and/or functionality of the guide RNAs disclosed here.

[0350] In some embodiments, the RNAs (including the guide RNAs) used in the compositions of the disclosure have undergone a chemical or biological modification to render them more stable. Exemplary modifications to an RNA include the depletion of a base (e.g., by deletion or by the substitution of one nucleotide for another) or modification of a base, for example, the chemical modification of a base. The phrase “chemical modifications” as used herein, includes modifications which introduce chemistries which differ from those seen in naturally occurring RNA, for example, covalent modifications such as the introduction of modified nucleotides, (e.g., nucleotide analogs, or the inclusion of pendant groups which are not naturally found in such mRNA molecules).

[0351] Other suitable polynucleotide modifications that may be incorporated into the RNAs used in the compositions of the disclosure include, but are not limited to, 4′-thio-modified bases: 4′-thio-adenosine, 4′-thio-guanosine, 4′-thio-cytidine, 4′-thio-uridine, 4′-thio-5-methyl-cytidine, 4′-thio-pseudouridine, and 4′-thio-2-thiouridine, pyridin-4-one ribonucleoside, 5-aza-uridine, 2-thio-5-aza-uridine, 2-thiouridine, 4-thio-pseudouridine, 2-thio-pseudouridine, 5-hydroxyuridine, 3-methyluridine, 5-carboxymethyl-uridine, 1-carboxymethyl-pseudouridine, 5-propynyl-uridine, 1-propynyl-pseudouridine, 5-taurinomethyluridine, 1-taurinomethyl-pseudouridine, 5-taurinomethyl-2-thio-uridine, 1-taurinomethyl-4-thio-uridine, 5-methyl-uridine, 1-methyl-pseudouridine, 4-thio-1-methyl-pseudouridine, 2-thio-1-methyl-pseudouridine, 1-methyl-1-deaza-pseudouridine, 2-thio-1-methyl-1-deaza-pseudouridine, dihydrouridine, dihydropseudouridine, 2-thio-dihydrouridine, 2-thio-dihydropseudouridine, 2-methoxyuridine, 2-methoxy-4-thio-uridine, 4-methoxy-pseudouridine, 4-methoxy-2-thio-pseudouridine, 5-aza-cytidine, pseudoisocytidine, 3-methyl-cytidine, N4-acetylcytidine, 5-formylcytidine, N4-methylcytidine, 5-hydroxymethylcytidine, 1-methyl-pseudoisocytidine, pyrrolo-cytidine, pyrrolo-pseudoisocytidine, 2-thio-cytidine, 2-thio-5-methyl-cytidine, 4-thio-pseudoisocytidine, 4-thio-1-methyl-pseudoisocytidine, 4-thio-1-methyl-1-deaza-pseudoisocytidine, 1-methyl-1-deaza-pseudoisocytidine, zebularine, 5-aza-zebularine, 5-methyl-zebularine, 5-aza-2-thio-zebularine, 2-thio-zebularine, 2-methoxy-cytidine, 2-methoxy-5-methyl-cytidine, 4-methoxy-pseudoisocytidine, 4-methoxy-1-methyl-pseudoisocytidine, 2-aminopurine, 2,6-diaminopurine, 7-deaza-adenine, 7-deaza-8-aza-adenine, 7-deaza-2-aminopurine, 7-deaza-8-aza-2-aminopurine, 7-deaza-2,6-diaminopurine, 7-deaza-8-aza-2,6-diaminopurine, 1-methyladenosine, N6-methyladenosine, N6-isopentenyladenosine, N6-(cis-hydroxyisopentenyl)adenosine, 2-methylthio-N6-(cis-hydroxyisopentenyl)adenosine, N6-glycinylcarbamoyladenosine, N6-threonylcarbamoyladenosine, 2-methylthio-N6-threonyl carbamoyladenosine, N6,N6-dimethyladenosine, 7-methyladenine, 2-methylthio-adenine, and 2-methoxy-adenine, inosine, 1-methyl-inosine, wyosine, wybutosine, 7-deaza-guanosine, 7-deaza-8-aza-guanosine, 6-thio-guanosine, 6-thio-7-deaza-guanosine, 6-thio-7-deaza-8-aza-guanosine, 7-methyl-guanosine, 6-thio-7-methyl-guanosine, 7-methylinosine, 6-methoxy-guanosine, 1-methylguanosine, N2-methylguanosine, N2,N2-dimethylguanosine, 8-oxo-guanosine, 7-methyl-8-oxo-guanosine, 1-methyl-6-thio-guanosine, N2-methyl-6-thio-guanosine, and N2,N2-dimethyl-6-thio-guanosine, and combinations thereof. The term modification also includes, for example, the incorporation of non-nucleotide linkages or modified nucleotides into the mRNA sequences of the present invention (e.g., modifications to one or both of the 3′ and 5′ ends of an mRNA molecule encoding a functional protein or enzyme). Such modifications include the addition of bases to an mRNA sequence (e.g., the inclusion of a poly A tail or a longer poly A tail), the alteration of the 3′ UTR or the 5′ UTR, complexing the mRNA with an agent (e.g., a protein or a complementary nucleic acid molecule), and inclusion of elements which change the structure of an RNA molecule (e.g., which form secondary structures).

[0352] In some embodiments, RNAs (e.g., guide RNAs) include a 5′ cap structure. A 5′ cap is typically added as follows: first, an RNA terminal phosphatase removes one of the terminal phosphate groups from the 5′ nucleotide, leaving two terminal phosphates; guanosine triphosphate (GTP) is then added to the terminal phosphates via a guanylyl transferase, producing a 5′5′5 triphosphate linkage; and the 7-nitrogen of guanine is then methylated by a methyltransferase. Examples of cap structures include, but are not limited to, m7G(5′)ppp (5′(A,G(5′)ppp(5′)A and G(5′)ppp(5′)G. Naturally occurring cap structures comprise a 7-methyl guanosine that is linked via a triphosphate bridge to the 5′-end of the first transcribed nucleotide, resulting in a dinucleotide cap of m7G(5′)ppp(5′)N, where N is any nucleoside. In vivo, the cap is added enzymatically. The cap is added in the nucleus and is catalyzed by the enzyme guanylyl transferase. The addition of the cap to the 5′ terminal end of RNA occurs immediately after initiation of transcription. The terminal nucleoside is typically a guanosine, and is in the reverse orientation to all the other nucleotides, i.e., G(5′)ppp(5′)GpNpNp.

[0353] Additional cap analogs include, but are not limited to, a chemical structures selected from the group consisting of m7GpppG, m7GpppA, m7GpppC; unmethylated cap analogs (e.g., GpppG); dimethylated cap analog (e.g., m2,7GpppG), trimethylated cap analog (e.g., m2,2,7GpppG), dimethylated symmetrical cap analogs (e.g., m7Gpppm7G), or anti reverse cap analogs (e.g., ARCA; m7,2′OmeGpppG, m72′dGpppG, m7,3′OmeGpppG, m7,3′dGpppG and their tetraphosphate derivatives) (see, e.g., Jemielity, J. et al., “Novel ‘anti-reverse’ cap analogs with superior translational properties”, RNA, 9: 1108-1122 (2003)).

[0354] Typically, the presence of a “tail” serves to protect the RNA (e.g., guide RNAs) from exonuclease degradation. A poly A or poly U tail is thought to stabilize natural messengers and synthetic sense RNA. Therefore, in certain embodiments a long poly A or poly U tail can be added to an RNA molecule thus rendering the RNA more stable. Poly A or poly U tails can be added using a variety of art-recognized techniques. For example, long poly A tails can be added to synthetic or in vitro transcribed RNA using poly A polymerase (Yokoe, et al. Nature Biotechnology. 1996; 14: 1252-1256). A transcription vector can also encode long poly A tails. In addition, poly A tails can be added by transcription directly from PCR products. Poly A may also be ligated to the 3′ end of a sense RNA with RNA ligase (see, e.g., Molecular Cloning A Laboratory Manual, 2nd Ed., ed. by Sambrook, Fritsch and Maniatis (Cold Spring Harbor Laboratory Press: 1991 edition)).

[0355] Typically, the length of a poly A or poly U tail can be at least about 10, 50, 100, 200, 300, 400 at least 500 nucleotides. In some embodiments, a poly-A tail on the 3′ terminus of mRNA typically includes about 10 to 300 adenosine nucleotides (e.g., about 10 to 200 adenosine nucleotides, about 10 to 150 adenosine nucleotides, about 10 to 100 adenosine nucleotides, about 20 to 70 adenosine nucleotides, or about 20 to 60 adenosine nucleotides). In some embodiments, mRNAs include a 3′ poly(C) tail structure. A suitable poly-C tail on the 3′ terminus of mRNA typically include about 10 to 200 cytosine nucleotides (e.g., about 10 to 150 cytosine nucleotides, about 10 to 100 cytosine nucleotides, about 20 to 70 cytosine nucleotides, about 20 to 60 cytosine nucleotides, or about 10 to 40 cytosine nucleotides). The poly-C tail may be added to the poly-A or poly U tail or may substitute the poly-A or poly U tail.

[0356] RNAs according to the present disclosure (e.g., Cas12a guide RNAs) may be synthesized according to any of a variety of known methods. For example, RNAs according to the present invention may be synthesized via in vitro transcription (IVT). Briefly, IVT is typically performed with a linear or circular DNA template containing a promoter, a pool of ribonucleotide triphosphates, a buffer system that may include DTT and magnesium ions, and an appropriate RNA polymerase (e.g., T3, T7 or SP6 RNA polymerase), DNAse I, pyrophosphatase, and/or RNAse inhibitor. The exact conditions will vary according to the specific application.

[0357] In a particular embodiment, the guide RNAs can comprise an MS2 modification, as specific RNA hairpin structure recognized in nature by a certain MS2-binding protein. This domain can help to stabilize the guide RNAs and improve the editing efficiency. The disclosure contemplates other similar modifications. A review of other such MS2-like domains are described in the art, for example, in Johansson et al., “RNA recognition by the MS2 phage coat protein,” Sem Virol., 1997, Vol. 8(3): 176-185; Delebecque et al., “Organization of intracellular reactions with rationally designed RNA assemblies,” Science, 2011, Vol. 333: 470-474; Mali et al., “Cas9 transcriptional activators for target specificity screening and paired nickases for cooperative genome engineering,” Nat. Biotechnol., 2013, Vol. 31: 833-838; and Zalatan et al., “Engineering complex synthetic transcriptional programs with CRISPR RNA scaffolds,” Cell, 2015, Vol. 160: 339-350, each of which are incorporated herein by reference in their entireties. Other systems include the PP7 hairpin, which specifically recruits the PCP protein, and the “com” hairpin, which specifically recruits the Corn protein. See Zalatan et al. The nucleotide sequence of the MS2 hairpin (or equivalently referred to as the“MS2 aptamer”) is: GCCAACATGAGGATCACCCATGTCTGCAGGGCC (SEQ IDNO:601).

### E. Cas12a (or Cas Type V) Editing Systems

[0358] The present disclosure relates to novel genome editing systems. In exemplary embodiments, the editing systems comprise:
[0359] (a) one or more polypeptide sequences comprising at least 45%, 46%, 47%, 48%, 49%, 50%, 51%, 52%, 53%, 54%, 55%, 56%, 57%, 58%, 59%, 60%, 61%, 62%, 63%, 64%, or 65% sequence identity to any one of sequences selected from SEQ ID NO: 334 (No. ID405), SEQ ID NO: 58 (No. ID414), or SEQ ID NO: 564 (No. ID418), SEQ ID NO: 335 (No. ID406), SEQ ID NO: 331 (No. ID411), SEQ ID NO: 20 (No. ID415), and SEQ ID NO: 445 (No. ID419); and
[0360] (b) one or more polynucleotide sequences comprising a guide RNA, wherein the guide RNA comprises a complementary sequence to that of a targeted polynucleotide sequence.

[0361] In other aspects, the Cas12a-based gene editing systems may comprise one or more additional accessory proteins having genome modifying functions, including recombinases, invertases, nucleases, polymerases, ligases, deaminases, reverse transcriptases, or epigenetic modifying functions. In various embodiments, the accessory proteins may be provided separately. In other embodiments, the accessory proteins may be fused to Cas12a, optionally with a linker.

[0362] In various embodiments, the genome editing system may comprise a guide RNA, which hybridizes to one or more targeted polynucleotide sequence. In preferred embodiments, the guide RNA of the genome editing system comprises 12-40 nucleotides.

[0363] In various embodiments, the genome editing system comprises the targeted polynucleotide sequence comprises one or more protospacer adjacent motif (PAM) recognition domains selected from 5′-TTTN-3′, 5′-TTN-3′, 5′-TNN-3′, 5′-TTV-3′, or 5′-TTTV-3′, wherein N=A, T, C or G and V=A, C or G. In additional embodiments, the targeted polynucleotide sequence comprises one or more relaxed PAM recognition domains. Jacobsen, Thomas et al. “Characterization of Cas12a nucleases reveals diverse PAM profiles between closely-related orthologs.” Nucleic acids research vol. 48, 10 (2020): 5624-5638. doi:10.1093/nar/gkaa272. Previous work has demonstrated to address the limitation for the requirement for an extended TTTV protospacer adjacent motif (PAM) by expanding the targeting range for non-canonical PAMs (such as ATTA, CTTA, GTTA, and TCTA) Kleinstiver, Benjamin P et al. “Engineered CRISPR-Cas12a variants with increased activities and improved targeting ranges for gene, epigenetic and base editing.” Nature biotechnology vol. 37, 3 (2019): 276-282. doi:10.1038/s41587-018-0011-0. Most of the Cpfl nucleases require thymine-rich PAM. Different studies have demonstrated an increased Cpfl targeting range using in vitro and in vivo (E. coli) PAM identification assays. Zhang, Xiaochun, et al. “Multiplex gene regulation by CRISPR-ddCpfl.” Cell discovery 3.1 (2017): 1-9. The two Cpfl endonucleases, AsCpfl and LbCpfl, require TTTV as a PAM sequence, where V can be A, C, or G nucleotides. Mutations at position S542R/K607R and S542R/K548V/N552R produced AsCpfl variants, and these are able to recognize TYCV and TATV PAMs, respectively, where Y can be C or T. Gao, Linyi, et al. “Engineered Cpfl variants with altered PAM specificities.” Nature biotechnology 35.8 (2017): 789-792. The AsCpfl showed increased activity for TTTV PAMs and decreased activity with TTTT PAM Kim, Hui K., et al. “In vivo high-throughput profiling of CRISPR-Cpfl activity.” Nature methods 14.2 (2017): 153-159.

[0364] Accordingly, it is within the scope of the disclosure to devise the Cas12a editing system to recognize altered PAM recognition domains for genome editing. In preferred embodiments, the Cas12a polypeptide recognizes one or more non-canonical PAM sequence in the targeted polynucleotide sequence, the PAM upstream of the crRNA-complementary DNA sequence on the non-target strand. In related embodiments, the gRNA has a seed sequence of eight nucleotides, located at the 5′ end of the spacer, and is proximal to the PAM sequence on the targeted polynucleotide sequence. Preferably, the Cas12a polypeptide cleaves the targeted polynucleotide sequence about 20 nucleotides upstream of the PAM sequence.

[0365] In further embodiments, the one or more polypeptide sequences and the one or more polynucleotide sequences comprising a cognate guide RNA of the genome editing system form a ribonucleoprotein complex.

[0366] In various embodiments, the one or more polypeptide sequences of the genome editing system comprise:
[0367] one or more α-helical recognition lobe (REC) and a nuclease lobe (NUC);
[0368] a Wedge (WED), α-helical recognition lobe (REC), PAM-interacting (PI),
[0369] RuvC nuclease, Bridge Helix (BH) and NUC domains; or
[0370] one or more domains selected from RuvC, REC, WED, BH, PI and NUC domains.

[0371] Preferably, the REC lobe comprises REC1 and REC2 domains. More preferably, the NUC lobe comprises the RuvC, PI, WED, and Bridge Helix (BH) domains. Additionally, the RuvC domain comprises subdomains RuvCI, RuvCII and RuvCIII. In preferred embodiments, the RuvCIII domain is located on the C-terminus.

[0372] In various embodiments, the one or more polypeptide sequences of the genome editing system lack a HNH endonuclease domain.

[0373] Without being bound by theory, the Cas12a genome editing system is characterized as a Class 2, Type V Cas endonuclease.

[0374] In various embodiments, the molecular weight of Cas12a nuclease is characterized in its molecular weight to be about 50 kDa-100 kDa, 100 kDa-200 kDa, 200 kDa-500 kDa.

[0375] In additional embodiments, the polypeptide sequences comprise at least one activity selected from endonuclease activity; endoribonuclease activity, or RNA-guided DNase activity. In such embodiments, the cognate guide RNA and the Cas12a protein modifies the targeted polynucleotide sequence of a host cell genome. In certain instances, the targeted polynucleotide sequence is modified by an insertion, deletion or alteration of one or more base pairs at the targeted polynucleotide sequence in the host cell genome.

[0376] In related embodiments, the genome editing system is characterized in enhanced efficiency and precision of site-directed integration. Preferably, the efficiency and precision of site-directed integration enabled by genome editing system is enhanced by staggered overhangs on the donor nucleic acid sequence. In certain embodiments, the targeted polynucleotide sequence is double-stranded and contains a 5′ overhang wherein the overhang preferably comprises five nucleotides.

[0377] In various embodiments, cleavage or cuts in the targeted polynucleotide sequence is preferably repaired by endogenous DNA polymerase repair mechanism present in the cell. In some embodiments, methods provide introducing a donor DNA sequence under conditions that allow editing of the targeted polynucleotide sequence by homology directed repair. Preferably, the Cas12a genome editing system is characterized as exhibiting reduced specificity, e.g., off-target effects relative to Cas9. More preferably, the Cas12a system comprises enhanced activity of at least 1, 1.5, 2, 2.5, 3, 3.5, 4, 4.5, 5, 5.5, 6, 6.5, 7, 7.5, 8, 8.5, 9, 9.5, 10 or higher-fold improvement.

[0378] In various embodiments, the RuvC domain comprising RuvC subdomains I, II and II of the Cas12a polypeptide of the Cas12a genome editing system cleaves the targeted polynucleotide sequence and/or a non-target DNA strand. Preferably, the genome editing system expresses multiple copies of guide RNA in a host cell of interest.

[0379] In various other embodiments, the polypeptide of the genome editing system comprises one or more mutations. Preferably, the mutation is selected from one or more domains selected from RuvC, REC, WED, BH, PI and NUC domains. More preferably, the mutation encodes a nuclease-deficient polypeptide. In various embodiments, the genome editing system comprises a fusion of one or more deaminases to the nuclease deficient polypeptide. Preferably, the one or more deaminases of the genome editing system is selected from adenine deaminase or cytosine deaminase. Use of cytidine deaminase and adenosine deaminase base editing is disclosed in U.S. Pat. No. 9,840,699. One approach is to produce an Cas12a fusion protein, preferably an inactive or nickase variant) and a base-editing enzyme or the active domain of a base editing enzyme. Cytidine deaminase and adenosine deaminase base editing is disclosed in U.S. Pat. No. 9,840,699. In various embodiments, the compositions comprise contacting a targeted polynucleotide sequence with a fusion protein comprising an Cas12a and one or more base-editing polypeptide such as a deaminase; and a gRNA targeting the fusion protein to the targeted polynucleotide sequence of the DNA strand. Accordingly, the fusion of one or more deaminases to the nuclease deficient polypeptide of the Cas12a genome editing system of enables base editing on DNA and/or RNA. In select embodiments, the system modifies one or more nucleobase on DNA and RNA. In related embodiments, the system enables multiplexed gene editing. Preferably, the genome editing system comprises a single crRNA. More preferably, the system enables targeting multiple genes simultaneously.

[0380] Recent studies demonstrate Cas12a's on-target gene editing efficiency approaching 100% through modifications to the NLS framework. Luk et al., GEN Biotechnology. June 2022.271-284. http://doi org/10. 1089/genbio.2022.0003. Previous work also demonstrated NLS-optimized SpCas9-based prime editor that improves genome editing efficiency Liu, Pengpeng et al. “Improved prime editors enable pathogenic allele correction and cancer modelling in adult mice.” Nature communications vol. 12, 1 2121. 9 Apr. 2021, doi:10.1038/s41467-021-22295-w.

[0381] In yet other embodiments, the Cas12a polypeptide is operably linked to a nuclear localization signal (NLS). Preferably, the Cas12a polypeptide comprises an NLS on the N-terminus or the C-terminus or both or multiple NLS on the Cas12a polypeptide. In some embodiments, the polypeptide linked to the NLS further comprises crRNA to form a ribonucleoprotein complex. In some embodiments, polypeptide comprises one or more NLS repeats at either N- or C-terminus of the polypeptide.

[0382] In select embodiments, the one or more polypeptide sequences of the genome editing system comprises a modification, wherein the modification comprises a nuclease-deficient polypeptide (dCas). In related embodiments, the guide RNA of the genome editing system of comprises a prime editing guide RNA (pegRNA). Preferably, the pegRNA of the genome editing system hybridizes to a targeted polynucleotide sequence and acts as a primer to the one or more reverse transcriptases. More preferably, the pegRNA of the genome editing system binds to the nicked strand for initiation of repair through a reverse transcriptase using the repair template.

[0383] In various additional embodiments, the nuclease-deficient polypeptide of the genome editing system comprises a nickase activity. Preferably, the genome editing system comprises fusion of one or more reverse transcriptases to the nuclease deficient Cas (dCas). In certain examples, the fusion of one or more reverse transcriptases is selected from Moloney Murine Leukemia Virus (M-MLV). In certain embodiments, the guide RNA or a pegRNA comprises or consists of an extended single guide RNA containing a primer binding site (PBS) and a reverse transcriptase (RT) template sequence.

[0384] The Cas12a genome editing system comprises improved genome editing characteristics selected from efficiency, specificity, precision, intended edits:unintended edits, indels relative to Cas9. Accordingly, it is an object of the invention to reduce off-target effects in host cells in comparison to an equivalent endonuclease activity in host cells relative to SpCas9.

### Optional Components/Modifications

### Donor Templates

[0385] In one embodiment, the compositions and systems herein may further comprise one or more donor templates for use in editing. In some cases, the donor template may comprise one or more polynucleotides. In certain cases, the donor template may comprise coding sequences for one or more polynucleotides. The donor template may be a DNA template. It may be single stranded or double stranded. It may also be circular single or double stranded. It may also be linear single stranded or double stranded. Without being bound by theory, the donor template may become integrated into the genome after a targeted cut by the Cas12a gene editing system described herein through cellular repair machinery including HDR and NHEJ.

[0386] The donor template may be used for editing the target polynucleotide. In some cases, the donor polynucleotide comprises one or more mutations to be introduced into the target polynucleotide. Examples of such mutations include substitutions, deletions, insertions, or a combination thereof. The mutations may cause a shift in an open reading frame on the target polynucleotide. In some cases, the donor template alters a stop codon in the target polynucleotide. For example, the donor template may correct a premature stop codon. The correction may be achieved by deleting the stop codon or introduces one or more mutations to the stop codon. In other example embodiments, the donor template addresses loss of function mutations, deletions, or translocations that may occur, for example, in certain disease contexts by inserting or restoring a functional copy of a gene, or functional fragment thereof, or a functional regulatory sequence or functional fragment of a regulatory sequence. A functional fragment refers to less than the entire copy of a gene by providing sufficient nucleotide sequence to restore the functionality of a wild type gene or non-coding regulatory sequence (e.g. sequences encoding long non-coding RNA). In certain example embodiments, the systems disclosed herein may be used to replace a single allele of a defective gene or defective fragment thereof. In another example embodiment, the systems disclosed herein may be used to replace both alleles of a defective gene or defective gene fragment. A “defective gene” or “defective gene fragment” is a gene or portion of a gene that when expressed fails to generate a functioning protein or non-coding RNA with functionality of a corresponding wild-type gene. In certain example embodiments, these defective genes may be associated with one or more disease phenotypes. In certain example embodiments, the defective gene or gene fragment is not replaced but the systems described herein are used to insert donor templates that encode gene or gene fragments that compensate for or override defective gene expression such that cell phenotypes associated with defective gene expression are eliminated or changed to a different or desired cellular phenotype.

[0387] In an embodiment of the invention, the donor template may include, but not be limited to, genes or gene fragments, encoding proteins or RNA transcripts to be expressed, regulatory elements, repair templates, and the like. According to the invention, the donor templates may comprise left end and right end sequence elements that function with transposition components that mediate insertion.

[0388] In certain cases, the donor template manipulates a splicing site on the target polynucleotide. In some examples, the donor template disrupts a splicing site. The disruption may be achieved by inserting the polynucleotide to a splicing site and/or introducing one or more mutations to the splicing site. In certain examples, the donor template may restore a splicing site. For example, the polynucleotide may comprise a splicing site sequence.

[0389] The donor template to be inserted may has a size from 10 base pair or nucleotides to 50 kb in length, e.g., from 50 to 40 k, from 100 and 30 k, from 100 to 10000, from 100 to 300, from 200 to 400, from 300 to 500, from 400 to 600, from 500 to 700, from 600 to 800, from 700 to 900, from 800 to 1000, from 900 to from 1100, from 1000 to 1200, from 1100 to 1300, from 1200 to 1400, from 1300 to 1500, from 1400 to 1600, from 1500 to 1700, from 600 to 1800, from 1700 to 1900, from 1800 to 2000 base pairs (bp) or nucleotides in length.

[0390] In some embodiments, the heterologous nucleic acid sequence is a donor DNA template that can be integrated into a host genome via HDR. In other embodiments, the heterologous nucleic acid sequence is a donor DNA template that can be integrated into a host genome via NHEJ.

[0391] In certain embodiments, the heterologous nucleic acid comprises or encodes a donor/template sequence, wherein the donor/template corrects/repairs/removes a mutation at the target genome site. For example, the mutation may be a mutated exon in a disease gene.

[0392] In certain embodiments, the donor/template may encode or comprises a functional DNA element, such as a promoter, an enhancer, a protein binding sequence, a methylation site, or a homology region for assisting gene editing, etc.

[0393] By “donor DNA” or “donor DNA template” it is meant a DNA segment (can be single stranded or double stranded DNA) to be inserted at a site cleaved by a gene-editing nuclease (e.g., a Cas12a nuclease) (e.g., after dsDNA cleavage, after nicking a target DNA, after dual nicking a target DNA, and the like). The donor DNA template can contain sufficient homology to a genomic sequence at the target site, e.g., 70%, 80%, 85%, 90%, 95%, or 100% homology with the nucleotide sequences flanking the target site, e.g. within about 50 bases or less of the target site, e.g. within about 30 bases, within about 15 bases, within about 10 bases, within about 5 bases, or immediately flanking the target site, to support homology-directed repair between it and the genomic sequence to which it bears homology. In the case of repair by NHEJ, no homology is needed on the donor DNA template against the site to which it targets editing.

[0394] Approximately 25, 50, 100, or 200 nucleotides, or more than 200 nucleotides, of sequence homology between a donor DNA template and a genomic sequence (or any integral value between 10 and 200 nucleotides, or more) can support homology-directed repair. Donor DNA template can be of any length, e.g., 50 nucleotides or more, 100 nucleotides or more, 250 nucleotides or more, 500 nucleotides or more, 1000 nucleotides or more, 5000 nucleotides or more, etc. A suitable donor DNA template can be from 50 nucleotides to 100 nucleotides, from 100 nucleotides to 500 nucleotides, from 500 nucleotides to 1000 nucleotides, from 1000 nucleotides to 5000 nucleotides, or from 5000 nucleotides to 10,000 nucleotides, or more than 10,000 nucleotides, in length.

[0395] As noted above, in some embodiments, the donor DNA template comprises a first homology arm and a second homology arm. The first homology arm is at or near the 5′ end of the donor DNA; and comprises a nucleotide sequence that is at least partially complementary to a first nucleotide sequence in a target nucleic acid. The second homology arm is at or near the 3′ end of the donor DNA; and comprises a nucleotide sequence that is at least partially complementary to a second nucleotide sequence in the target nucleic acid. The first and second homology arms can each independently have a length of from about 10 nucleotides to 400 nucleotides; e.g., from 10 nucleotides (nt) to 15 nt, from 15 nt to 20 nt, from 20 nt to nt, from 25 nt to 30 nt, from 30 nt to 35 nt, from 35 nt to 40 nt, from 40 nt to 45 nt, from 45 nt to 50 nt, from 50 nt to 75 nt, from 75 nt to 100 nt, from 100 nt to 125 nt, from 125 nt to 150 nt, from 150 nt to 175 nt, from 175 nt to 200 nt, from 200 nt to 225 nt, from 225 nt to 250 nt, from 250 nt to 275 nt, from 275 nt to 300 nt, from 325 nt to 350 nt, from 350 nt to 375 nt, or from 375 nt to 400 nt.

[0396] In certain embodiments, the donor DNA template is used for editing the target nucleotide sequence. In certain embodiments, the donor DNA template comprises one or more mutations to be introduced into the target polynucleotide. Examples of such mutations include substitutions, deletions, insertions, or a combination thereof. In certain embodiments, the mutation causes a shift in an open reading frame on the target polynucleotide. In certain embodiments, the donor polynucleotide alters a stop codon in the target polynucleotide. In certain embodiments, the donor polynucleotide corrects a premature stop codon. The correction can be achieved by deleting the stop codon, or by introducing one or more sequence changes to alter the stop codon to a codon. In certain embodiments, the donor polynucleotide addresses loss of function mutations, deletions, or translocations that may occur, for example, in certain disease contexts by inserting or restoring a functional copy of a gene, or functional fragment thereof, or a functional regulatory sequence or functional fragment of a regulatory sequence. A functional fragment includes a fragment less than the entire copy of a gene but otherwise provides sufficient nucleotide sequence to restore the functionality of a wild type gene or non-coding regulatory sequence (e.g., sequences encoding long non-coding RNA).

[0397] In certain embodiments, the donor DNA template may be used to replace a single allele of a defective gene or defective fragment thereof. In another embodiment, the donor DNA template is used to replace both alleles of a defective gene or defective gene fragment. A “defective gene” or “defective gene fragment” is a gene or portion of a gene that when expressed, fails to generate a functioning protein or non-coding RNA with functionality of the corresponding wild-type gene.

[0398] In certain example embodiments, these defective genes may be associated with one or more disease phenotypes. In certain example embodiments, the defective gene or gene fragment is not replaced but the heterologous nucleic acid is used to insert donor polynucleotides that encode gene or gene fragments that compensate for or override defective gene expression such that cell phenotypes associated with defective gene expression are eliminated or changed to a different or desired cellular phenotype. This can be achieved by including the coding sequence of a therapeutic protein, such as a therapeutic antibody or functional fragment thereof, or a wild-type version of a defective protein associated with one or more disease phenotypes.

[0399] In certain embodiments, the donor may include, but not be limited to, genes or gene fragments, encoding proteins or RNA transcripts to be expressed, regulatory elements, repair templates, and the like. According to the invention, the donor polynucleotides may comprise left end and right end sequence elements that function with transposition components that mediate insertion.

[0400] In certain embodiments, the donor DNA template manipulates a splicing site on the target polynucleotide. In certain embodiments, the donor DNA template disrupts a splicing site. The disruption may be achieved by inserting the polynucleotide to a splicing site and/or introducing one or more mutations to the splicing site. In certain embodiments, the donor polynucleotide may restore a splicing site. For example, the polynucleotide may comprise a splicing site sequence.

[0401] In certain embodiments, the donor DNA template to be inserted has a size from 10 bp to 50 kb in length, e.g., from 50 bp to ˜40 kb, from 100 bp to ˜30 kb, from 100 bp to ˜10 kb, from 100 bp to 300 bp, from 200 bp to 400 bp, from 300 bp to 500 bp, from 400 bp to 600 bp, from 500 bp to 700 bp, from 600 bp to 800 bp, from 700 bp to 900 bp, from 800 bp to 1000 bp, from 900 bp to 1100 bp, from 1000 bp to 1200 bp, from 1100 bp to 1300 bp, from 1200 bp to 1400 bp, from 1300 bp to 1500 bp, from 1400 bp to 1600 bp, from 1500 bp to 1700 bp, from 1600 bp to 1800 bp, from 1700 bp to 1900 bp, from 1800 bp to 2000 bp nucleotides in length.

[0402] In certain embodiments, the homologous arm on one or both ends of the sequence to be inserted is independently about 20 bp, 40 bp, 60 bp, 80 bp, 100 bp, 120 bp, or 150 bp.

[0403] The first homology arm and the second homology arm of the donor DNA flank a nucleotide sequence (“a nucleotide sequence of interest” or “an intervening nucleotide sequence”) that is to be introduced into a target nucleic acid. The nucleotide sequence of interest can comprise: i) a nucleotide sequence encoding a polypeptide of interest; ii) a nucleotide sequence encoding an exon of a gene; iii) a promoter sequence; iv) an enhancer sequence; v) a nucleotide sequence encoding a non-coding RNA; or vi) any combination of the foregoing.

[0404] The donor DNA can provide for gene correction, gene replacement, gene tagging, transgene insertion, nucleotide deletion, gene disruption, gene mutation, etc. For example, the donor DNA can be used to add, e.g., insert or replace, nucleic acid material to a target DNA (e.g. to “knock in” a nucleic acid that encodes a protein, an siRNA, an miRNA, etc.), to add a tag (e.g., 6×His, a fluorescent protein (e.g., a green fluorescent protein; a yellow fluorescent protein, etc.), hemagglutinin (HA), FLAG, etc.), to add a regulatory sequence to a gene (e.g. promoter, polyadenylation signal, internal ribosome entry sequence (IRES), 2A peptide, start codon, stop codon, splice signal, localization signal, enhancer, etc.), to modify a nucleic acid sequence (e.g., introduce a mutation), and the like. For example, the donor DNA can be used to modify DNA in a site-specific, i.e. “targeted”, way; for example gene knock-out, gene knock-in, gene editing, gene tagging, etc., as used in, for example, gene therapy, e.g. to treat a disease; or as an antiviral, antipathogenic, or anticancer therapeutic, the production of genetically modified organisms in agriculture, the large scale production of proteins by cells for therapeutic, diagnostic, or research purposes, the induction of pluripotent stem cells, biological research, the targeting of genes of pathogens for deletion or replacement, etc.

[0405] In some cases, the donor DNA comprises a nucleotide sequence encoding a polypeptide of interest. Polypeptides of interest include, e.g., a) functional versions of a polypeptide that comprises one or more amino acid substitutions, insertions, and/or deletions and that exhibits reduced function, e.g., where the reduced function is associated with or causes a pathological condition; b) fluorescent polypeptides; c) hormones; d) receptors for ligands; e) ion channels; f) neurotransmitters; g) and the like.

[0406] In some cases, the donor DNA comprises a nucleotide sequence that encodes a wild-type protein that is lacking in the recipient cell. In some cases, the donor DNA encodes a wild type factor (e.g. Factor VII, Factor VIII, Factor IX and the like) involved in coagulation. In some cases, the donor DNA comprises a nucleotide sequence that encodes a therapeutic antibody. In some cases, the donor DNA comprises a nucleotide sequence that encodes an engineered protein or receptor. In some cases, the engineered receptor is a T cell receptor (TCR), a natural killer (NK) receptor (NKR), or a B cell receptor (BCR). In some cases, the engineered TCR or NKR targets a cancer marker (e.g., a polypeptide that is expressed (e.g., over-expressed) on the surface of a cancer cell). In some cases, the donor DNA comprises a nucleotide sequence that encodes a chimeric antigen receptor (CAR). In some cases, the CAR targets a cancer marker. Donor DNAs encoding CAR, TCR, and/or NCR proteins may be folded into DNA origami structures (DNA nanostructures) and delivered into T cells or NK cells in vitro or in vivo.

[0407] Non-limiting examples of polypeptides that can be encoded by a donor DNA include, e.g., IL1B (interleukin 1, beta), XDH (xanthine dehydrogenase), TP53 (tumor protein p53), PTGIS (prostaglandin 12 (prostacyclin) synthase), MB (myoglobin), IL4 (interleukin 4), ANGPT1 (angiopoietin 1), ABCG8 (ATP-binding cassette, sub-family G (WHITE), member 8), CTSK (cathepsin K), PTGIR (prostaglandin 12 (prostacyclin) receptor (IP)), KCNJ11 (potassium inwardly-rectifying channel, subfamily J, member 11), INS (insulin), CRP (C-reactive protein, pentraxin-related), PDGFRB (platelet-derived growth factor receptor, beta polypeptide), CCNA2 (cyclin A2), PDGFB (platelet-derived growth factor beta polypeptide (simian sarcoma viral (v-sis) oncogene homolog)), KCNJ5 (potassium inwardly-rectifying channel, subfamily J, member 5), KCNN3 (potassium intermediate/small conductance calcium-activated channel, subfamily N, member 3), CAPN10 (calpain 10), PTGES (prostaglandin E synthase), ADRA2B (adrenergic, alpha-2B-, receptor), ABCG5 (ATP-binding cassette, sub-family G (WHITE), member 5), PRDX2 (peroxiredoxin 2), CAPN5 (calpain 5), PARP14 (poly (ADP-ribose) polymerase family, member 14), MEX3C (mex-3 homolog C (C. elegans)), ACE angiotensin I converting enzyme (peptidyl-dipeptidase A) 1), TNF (tumor necrosis factor (TNF superfamily, member 2)), IL6 (interleukin 6 (interferon, beta 2)), STN (statin), SERPINE1 (serpin peptidase inhibitor, Glade E (nexin, plasminogen activator inhibitor type 1), member 1), ALB (albumin), ADIPOQ (adiponectin, C1Q and collagen domain containing), APOB (apolipoprotein B (including Ag(x) antigen)), APOE (apolipoprotein E), LEP (leptin), MTHFR (5,10-methylenetetrahydrofolate reductase (NADPH)), APOA1 (apolipoprotein A-I), EDN1 (endothelin 1), NPPB (natriuretic peptide precursor B), NOS3 (nitric oxide synthase 3 (endothelial cell)), PPARG (peroxisome proliferator-activated receptor gamma), PLAT (plasminogen activator, tissue), PTGS2 (prostaglandin-endoperoxide synthase 2 (prostaglandin G/H synthase and cyclooxygenase)), CETP (cholesteryl ester transfer protein, plasma), AGTR1 (angiotensin II receptor, type 1), HMGCR (3-hydroxy-3-methylglutaryl-Coenzyme A reductase), IGF1 (insulin-like growth factor 1 (somatomedin C)), SELE (selectin E), REN (renin), PPARA (peroxisome proliferator-activated receptor alpha), PON1 (paraoxonase 1), KNG1 (kininogen 1), CCL2 (chemokine (C-C motif) ligand 2), LPL (lipoprotein lipase), vWF (von Willebrand factor), F2 (coagulation factor II (thrombin)), ICAM1 (intercellular adhesion molecule 1), TGFB1 (transforming growth factor, beta 1), NPPA (natriuretic peptide precursor A), IL10 (interleukin 10), EPO (erythropoietin), SOD1 (superoxide dismutase 1, soluble), VCAM1 (vascular cell adhesion molecule 1), IFNG (interferon, gamma), LPA (lipoprotein, Lp(a)), MPO (myeloperoxidase), ESR1 (estrogen receptor 1), MAPK1 (mitogen-activated protein kinase 1), HP (haptoglobin), F3 (coagulation factor III (thromboplastin, tissue factor)), CST3 (cystatin C), COG2 (component of oligomeric Golgi complex 2), MMP9 (matrix metallopeptidase 9 (gelatinase B, 92 kDa gelatinase, 92 kDa type IV collagenase)), SERPINC1 (serpin peptidase inhibitor, Glade C (antithrombin), member 1), F8 (coagulation factor VIII, procoagulant component), HMOX1 (heme oxygenase (decycling) 1), APOC3 (apolipoprotein C-III), IL8 (interleukin 8), PROK1 (prokineticin 1), CBS (cystathionine-beta-synthase), NOS2 (nitric oxide synthase 2, inducible), TLR4 (toll-like receptor 4), SELP (selectin P (granule membrane protein 140 kDa, antigen CD62)), ABCA1 (ATP-binding cassette, sub-family A (ABC1), member 1), AGT (angiotensinogen (serpin peptidase inhibitor, Glade A, member 8)), LDLR (low density lipoprotein receptor), GPT (glutamic-pyruvate transaminase (alanine aminotransferase)), VEGFA (vascular endothelial growth factor A), NR3C2 (nuclear receptor subfamily 3, group C, member 2), IL18 (interleukin 18 (interferon-gamma-inducing factor)), NOS1 (nitric oxide synthase 1 (neuronal)), NR3C1 (nuclear receptor subfamily 3, group C, member 1 (glucocorticoid receptor)), FGB (fibrinogen beta chain), HGF (hepatocyte growth factor (hepapoietin A; scatter factor)), ILIA (interleukin 1, alpha), RETN (resistin), AKT1 (v-akt murine thymoma viral oncogene homolog 1), LIPC (lipase, hepatic), HSPD1 (heat shock 60 kDa protein 1 (chaperonin)), MAPK14 (mitogen-activated protein kinase 14), SPP1 (secreted phosphoprotein 1), ITGB3 (integrin, beta 3 (platelet glycoprotein 111a, antigen CD61)), CAT (catalase), UTS2 (urotensin 2), THBD (thrombomodulin), F10 (coagulation factor X), CP (ceruloplasmin (ferroxidase)), TNFRSF11B (tumor necrosis factor receptor superfamily, member lib), EDNRA (endothelin receptor type A), EGFR (epidermal growth factor receptor (erythroblastic leukemia viral (v-erb-b) oncogene homolog, avian)), MMP2 (matrix metallopeptidase 2 (gelatinase A, 72 kDa gelatinase, 72 kDa type IV collagenase)), PLG (plasminogen), NPY (neuropeptide Y), RHOD (ras homolog gene family, member D), MAPK8 (mitogen-activated protein kinase 8), MYC (v-myc myelocytomatosis viral oncogene homolog (avian)), FN1 (fibronectin 1), CMA1 (chymase 1, mast cell), PLAU (plasminogen activator, urokinase), GNB3 (guanine nucleotide binding protein (G protein), beta polypeptide 3), ADRB2 (adrenergic, beta-2-, receptor, surface), APOA5 (apolipoprotein A-V), SOD2 (superoxide dismutase 2, mitochondrial), F5 (coagulation factor V (proaccelerin, labile factor)), VDR (vitamin D (1,25-dihydroxyvitamin D3) receptor), ALOX5 (arachidonate 5-lipoxygenase), HLA-DRB1 (major histocompatibility complex, class II, DR beta 1), PARP1 (poly (ADP-ribose) polymerase 1), CD40LG (CD40 ligand), PON2 (paraoxonase 2), AGER (advanced glycosylation end product-specific receptor), IRS1 (insulin receptor substrate 1), PTGS1 (prostaglandin-endoperoxide synthase 1 (prostaglandin G/H synthase and cyclooxygenase)), ECE1 (endothelin converting enzyme 1), F7 (coagulation factor VII (serum prothrombin conversion accelerator)), URN (interleukin 1 receptor antagonist), EPHX2 (epoxide hydrolase 2, cytoplasmic), IGFBP1 (insulin-like growth factor binding protein 1), MAPK10 (mitogen-activated protein kinase 10), FAS (Fas (TNF receptor superfamily, member 6)), ABCB1 (ATP-binding cassette, sub-family B (MDR/TAP), member 1), JUN (jun oncogene), IGFBP3 (insulin-like growth factor binding protein 3), CD14 (CD14 molecule), PDESA (phosphodiesterase 5A, cGMP-specific), AGTR2 (angiotensin II receptor, type 2), CD40 (CD40 molecule, TNF receptor superfamily member 5), LCAT (lecithin-cholesterol acyltransferase), CCR5 (chemokine (C-C motif) receptor 5), MMP1 (matrix metallopeptidase 1 (interstitial collagenase)), TIMP1 (TIMP metallopeptidase inhibitor 1), ADM (adrenomedullin), DYT10 (dystonia 10), STAT3 (signal transducer and activator of transcription 3 (acute-phase response factor)), MMP3 (matrix metallopeptidase 3 (stromelysin 1, progelatinase)), ELN (elastin), USF1 (upstream transcription factor 1), CFH (complement factor H), HSPA4 (heat shock 70 kDa protein 4), MMP12 (matrix metallopeptidase 12 (macrophage elastase)), MME (membrane metallo-endopeptidase), F2R (coagulation factor II (thrombin) receptor), SELL (selectin L), CTSB (cathepsin B), ANXA5 (annexin A5), ADRB1 (adrenergic, beta-1-, receptor), CYBA (cytochrome b-245, alpha polypeptide), FGA (fibrinogen alpha chain), GGT1 (gamma-glutamyltransferase 1), LIPG (lipase, endothelial), HIF1A (hypoxia inducible factor 1, alpha subunit (basic helix-loop-helix transcription factor)), CXCR4 (chemokine (C-X-C motif) receptor 4), PROC (protein C (inactivator of coagulation factors Va and Villa)), SCARB1 (scavenger receptor class B, member 1), CD79A (CD79a molecule, immunoglobulin-associated alpha), PLTP (phospholipid transfer protein), ADD1 (adducin 1 (alpha)), FGG (fibrinogen gamma chain), SAA1 (serum amyloid A1), KCNH2 (potassium voltage-gated channel, subfamily H (eag-related), member 2), DPP4 (dipeptidyl-peptidase 4), G6PD (glucose-6-phosphate dehydrogenase), NPR1 (natriuretic peptide receptor A/guanylate cyclase A (atrionatriuretic peptide receptor A)), VTN (vitronectin), KIAA0101 (KIAA0101), FOS (FBJ murine osteosarcoma viral oncogene homolog), TLR2 (toll-like receptor 2), PPIG (peptidylprolyl isomer ase G (cyclophilin G)), IL1R1 (interleukin 1 receptor, type I), AR (androgen receptor), CYP1A1 (cytochrome P450, family 1, subfamily A, polypeptide 1), SERPINA1 (serpin peptidase inhibitor, Glade A (alpha-1 antiproteinase, antitrypsin), member 1), MTR (5-methyltetrahydrofolate-homocysteine methyltransferase), RBP4 (retinol binding protein 4, plasma), APOA4 (apolipoprotein A-IV), CDKN2A (cyclin-dependent kinase inhibitor 2A (melanoma, p16, inhibits CDK4)), FGF2 (fibroblast growth factor 2 (basic)), EDNRB (endothelin receptor type B), ITGA2 (integrin, alpha 2 (CD49B, alpha 2 subunit of VLA-2 receptor)), CAB INI (calcineurin binding protein 1), SHBG (sex hormone-binding globulin), HMGB1 (high-mobility group box 1), HSP90B2P (heat shock protein 90 kDa beta (Grp94), member 2 (pseudogene)), CYP3A4 (cytochrome P450, family 3, subfamily A, polypeptide 4), GJA1 (gap junction protein, alpha 1, 43 kDa), CAV1 (caveolin 1, caveolae protein, 22 kDa), ESR2 (estrogen receptor 2 (ER beta)), LTA (lymphotoxin alpha (TNF superfamily, member 1)), GDF15 (growth differentiation factor 15), BDNF (brain-derived neurotrophic factor), CYP2D6 (cytochrome P450, family 2, subfamily D, polypeptide 6), NGF (nerve growth factor (beta polypeptide)), SP1 (Sp 1 transcription factor), TGIF1 (TGFB-induced factor homeobox 1), SRC (v-src sarcoma (Schmidt-Ruppin A-2) viral oncogene homolog (avian)), EGF (epidermal growth factor (beta-urogastrone)), PIK3CG (phosphoinositide-3-kinase, catalytic, gamma polypeptide), HLA-A (major histocompatibility complex, class I, A), KCNQ1 (potassium voltage-gated channel, KQT-like subfamily, member 1), CNR1 (cannabinoid receptor 1 (brain)), FBN1 (fibrillin 1), CHKA (choline kinase alpha), BEST1 (bestrophin 1), APP (amyloid beta (A4) precursor protein), CTNNB1 (catenin (cadherin-associated protein), beta 1, 88 kDa), IL2 (interleukin 2), CD36 (CD36 molecule (thrombospondin receptor)), PRKAB1 (protein kinase, AMP-activated, beta 1 non-catalytic subunit), TPO (thyroid peroxidase), ALDH7A1 (aldehyde dehydrogenase 7 family, member A1), CX3CR1 (chemokine (C-X3-C motif) receptor 1), TH (tyrosine hydroxylase), F9 (coagulation factor IX), GH1 (growth hormone 1), TF (transferrin), HFE (hemochromatosis), IE17A (interleukin 17A), PTEN (phosphatase and tensin homolog), GSTM1 (glutathione S-transferase mu 1), DMD (dystrophin), GATA4 (GATA binding protein 4), F13A1 (coagulation factor XIII, A1 polypeptide), TTR (transthyretin), FABP4 (fatty acid binding protein 4, adipocyte), PON3 (paraoxonase 3), APOC1 (apolipoprotein C-I), INSR (insulin receptor), TNFRSF1B (tumor necrosis factor receptor superfamily, member IB), HTR2A (5-hydroxytryptamine (serotonin) receptor 2A), CSF3 (colony stimulating factor 3 (granulocyte)), CYP2C9 (cytochrome P450, family 2, subfamily C, polypeptide 9), TXN (thioredoxin), CYP11B2 (cytochrome P450, family 11, subfamily B, polypeptide 2), PTH (parathyroid hormone), CSF2 (colony stimulating factor 2 (granulocyte-macrophage)), KDR (kinase insert domain receptor (a type III receptor tyrosine kinase)), PLA2G2A (phospholipase A2, group IIA (platelets, synovial fluid)), B2M (beta-2-microglobulin), THBS1 (thrombospondin 1), GCG (glucagon), RHOA (ras homolog gene family, member A), ALDH2 (aldehyde dehydrogenase 2 family (mitochondrial)), TCF7L2 (transcription factor 7-like 2 (T-cell specific, HMG-box)), BDKRB2 (bradykinin receptor B2), NFE2L2 (nuclear factor (erythroid-derived 2)-like 2), NOTCH1 (Notch homolog 1, translocation-associated (Drosophila)), UGT1A1 (UDP glucuronosyltransferase 1 family, polypeptide A1), IFNA1 (interferon, alpha 1), PPARD (peroxisome proliferator-activated receptor delta), SIRT1 (sirtuin (silent mating type information regulation 2 homolog) 1 (S. cerevisiae)), GNRH1 (gonadotropin-releasing hormone 1 (luteinizing-releasing hormone)), PAPPA (pregnancy-associated plasma protein A, pappalysin 1), ARR3 (arrestin 3, retinal (X-arrestin)), NPPC (natriuretic peptide precursor C), AHSP (alpha hemoglobin stabilizing protein), PTK2 (PTK2 protein tyrosine kinase 2), IL13 (interleukin 13), MTOR (mechanistic target of rapamycin (serine/threonine kinase)), ITGB2 (integrin, beta 2 (complement component 3 receptor 3 and 4 subunit)), GSTT1 (glutathione S-transferase theta 1), IL6ST (interleukin 6 signal transducer (gpl30, oncostatin M receptor)), CPB2 (carboxypeptidase B2 (plasma)), CYP1A2 (cytochrome P450, family 1, subfamily A, polypeptide 2), HNF4A (hepatocyte nuclear factor 4, alpha), SLC6A4 (solute carrier family 6 (neurotransmitter transporter, serotonin), member 4), PLA2G6 (phospholipase A2, group VI (cytosolic, calcium-independent)), TNFSF11 (tumor necrosis factor (ligand) superfamily, member 11), SLC8A1 (solute carrier family 8 (sodium/calcium exchanger), member 1), F2RL1 (coagulation factor II (thrombin) receptor-like 1), AKR1A1 (aldo-keto reductase family 1, member A1 (aldehyde reductase)), ALDH9A1 (aldehyde dehydrogenase 9 family, member A1), BGLAP (bone gamma-carboxyglutamate (gla) protein), MTTP (microsomal triglyceride transfer protein), MTRR (5-methyltetrahydrofolate-homocysteine methyltransferase reductase), SULT1A3 (sulfotransferase family, cytosolic, 1A, phenol-preferring, member 3), RAGE (renal tumor antigen), C4B (complement component 4B (Chido blood group), P2RY12 (purinergic receptor P2Y, G-protein coupled, 12), RNLS (renalase, FAD-dependent amine oxidase), CREB1 (cAMP responsive element binding protein 1), POMC (proopiomelanocortin), RAC1 (ras-related C3 botulinum toxin substrate 1 (rho family, small GTP binding protein Racl)), LMNA (lamin NC), CD59 (CD59 molecule, complement regulatory protein), SCN5A (sodium channel, voltage-gated, type V, alpha subunit), CYP1B1 (cytochrome P450, family 1, subfamily B, polypeptide 1), MIF (macrophage migration inhibitory factor (glycosylation-inhibiting factor)), MMP13 (matrix metallopeptidase 13 (collagenase 3)), TIMP2 (TIMP metallopeptidase inhibitor 2), CYP19A1 (cytochrome P450, family 19, subfamily A, polypeptide 1), CYP21A2 (cytochrome P450, family 21, subfamily A, polypeptide 2), PTPN22 (protein tyrosine phosphatase, non-receptor type 22 (lymphoid)), MYH14 (myosin, heavy chain 14, non-muscle), MBL2 (mannose-binding lectin (protein C) 2, soluble (opsonic defect)), SELPLG (selectin P ligand), AOC3 (amine oxidase, copper containing 3 (vascular adhesion protein 1)), CTSL1 (cathepsin LI), PCNA (proliferating cell nuclear antigen), IGF2 (insulin like growth factor 2 (somatomedin A)), ITGB1 (integrin, beta 1 (fibronectin receptor, beta polypeptide, antigen CD29 includes MDF2, MSK12)), CAST (calpastatin), CXCL12 (chemokine (C-X-C motif) ligand 12 (stromal cell-derived factor 1)), IGHE (immunoglobulin heavy constant epsilon), KCNE1 (potassium voltage-gated channel, Isk-related family, member 1), TFRC (transferrin receptor (p90, CD71)), COL1A1 (collagen, type I, alpha 1), COL1A2 (collagen, type I, alpha 2), IL2RB (interleukin 2 receptor, beta), PLA2G10 (phospholipase A2, group X), ANGPT2 (angiopoietin 2), PROCR (protein C receptor, endothelial (EPCR)), NOX4 (NADPH oxidase 4), HAMP (hepcidin antimicrobial peptide), PTPN11 (protein tyrosine phosphatase, non-receptor type 11), SLC2A1 (solute carrier family 2 (facilitated glucose transporter), member 1), IL2RA (interleukin 2 receptor, alpha), CCL5 (chemokine (C-C motif) ligand 5), IRF1 (interferon regulatory factor 1), CFLAR (CASP8 and FADD-like apoptosis regulator), CALC A (calcitonin-related polypeptide alpha), EIF4E (eukaryotic translation initiation factor 4E), GSTP1 (glutathione S-transferase pi 1), JAK2 (Janus kinase 2), CYP3A5 (cytochrome P450, family 3, subfamily A, polypeptide 5), HSPG2 (heparan sulfate proteoglycan 2), CCL3 (chemokine (C-C motif) ligand 3), MYD88 (myeloid differentiation primary response gene (88)), VIP (vasoactive intestinal peptide), SOAT1 (sterol O-acyltransferase 1), ADRBK1 (adrenergic, beta, receptor kinase 1), NR4A2 (nuclear receptor subfamily 4, group A, member 2), MMP8 (matrix metallopeptidase 8 (neutrophil collagenase)), NPR2 (natriuretic peptide receptor B/guanylate cyclase B (atrionatriuretic peptide receptor B)), GCH1 (GTP cyclohydrolase 1), EPRS (glutamyl-prolyl-tRNA synthetase), PPARGC1A (peroxisome proliferator-activated receptor gamma, coactivator 1 alpha), F12 (coagulation factor XII (Hageman factor)), PEC AMI (platelet/endothelial cell adhesion molecule), CCL4 (chemokine (C-C motif) ligand 4), SERPINA3 (serpin peptidase inhibitor, Glade A (alpha-1 antiproteinase, antitrypsin), member 3), CASR (calcium-sensing receptor), GJA5 (gap junction protein, alpha 5, 40 kDa), FABP2 (fatty acid binding protein 2, intestinal), TTF2 (transcription termination factor, RNA polymerase II), PROS1 (protein S (alpha)), CTF1 (cardiotrophin 1), SGCB (sarcoglycan, beta (43 kDa dystrophin-associated glycoprotein)), YME1L1 (YMEl-like 1 (S. cerevisiae)), CAMP (cathelicidin antimicrobial peptide), ZC3H12A (zinc finger CCCH-type containing 12A), AKR1B1 (aldo-keto reductase family 1, member B1 (aldose reductase)), DES (desmin), MMP7 (matrix metallopeptidase 7 (matrilysin, uterine)), AHR (aryl hydrocarbon receptor), CSF1 (colony stimulating factor 1 (macrophage)), HDAC9 (histone deacetylase 9), CTGF (connective tissue growth factor), KCNMA1 (potassium large conductance calcium-activated channel, subfamily M, alpha member 1), UGT1A (UDP glucuronosyltransferase 1 family, polypeptide A complex locus), PRKCA (protein kinase C, alpha), COMT (catechol-b-methyltransferase), S100B (S100 calcium binding protein B), EGR1 (early growth response 1), PRL (prolactin), IL15 (interleukin 15), DRD4 (dopamine receptor D4), CAMK2G (calcium/calmodulin-dependent protein kinase II gamma), SLC22A2 (solute carrier family 22 (organic cation transporter), member 2), CCL11 (chemokine (C-C motif) ligand 11), PGF (placental growth factor), THPO (thrombopoietin), GP6 (glycoprotein VI (platelet)), TACR1 (tachykinin receptor 1), NTS (neurotensin), HNF1A (HNF1 homeobox A), SST (somatostatin), KCND1 (potassium voltage-gated channel, Shal-related subfamily, member 1), LOC646627 (phospholipase inhibitor), TBXAS1 (thromboxane A synthase 1 (platelet)), CYP2J2 (cytochrome P450, family 2, subfamily J, polypeptide 2), TBXA2R (thromboxane A2 receptor), ADH1C (alcohol dehydrogenase 1C (class I), gamma polypeptide), ALOX12 (arachidonate 12-lipoxygenase), AHSG (alpha-2-HS-glycoprotein), BHMT (betaine-homocysteine methyltransferase), GJA4 (gap junction protein, alpha 4, 37 kDa), SLC25A4 (solute carrier family 25 (mitochondrial carrier; adenine nucleotide translocator), member 4), ACLY (ATP citrate lyase), ALOX5AP (arachidonate 5-lipoxygenase-activating protein), NUMA1 (nuclear mitotic apparatus protein 1), CYP27B1 (cytochrome P450, family 27, subfamily B, polypeptide 1), CYSLTR2 (cysteinyl leukotriene receptor 2), SOD3 (superoxide dismutase 3, extracellular), LTC4S (leukotriene C4 synthase), UCN (urocortin), GHRL (ghrelin/obestatin prepropeptide), APOC2 (apolipoprotein C-II), CLEC4A (C-type lectin domain family 4, member A), KBTBD10 (kelch repeat and BTB (POZ) domain containing 10), TNC (tenascin C), TYMS (thymidylate synthetase), SHC1 (SHC (Src homology 2 domain containing) transforming protein 1), LRP1 (low density lipoprotein receptor-related protein 1), SOCS3 (suppressor of cytokine signaling 3), ADH1B (alcohol dehydrogenase IB (class I), beta polypeptide), KLK3 (kallikrein-related peptidase 3), HSD11B1 (hydroxysteroid (11-beta) dehydrogenase 1), VKORC1 (vitamin K epoxide reductase complex, subunit 1), SERPINB2 (serpin peptidase inhibitor, Glade B (ovalbumin), member 2), TNS1 (tensin 1), RNF19A (ring finger protein 19A), EPOR (erythropoietin receptor), ITGAM (integrin, alpha M (complement component 3 receptor 3 subunit)), PITX2 (paired-like homeodomain 2), MAPK7 (mitogen-activated protein kinase 7), FCGR3A (Fc fragment of IgG, low affinity 111a, receptor (CD16a)), LEPR (leptin receptor), ENG (endoglin), GPX1 (glutathione peroxidase 1), GOT2 (glutamic-oxaloacetic transaminase 2, mitochondrial (aspartate aminotransferase 2)), HRH1 (histamine receptor HI), NR112 (nuclear receptor subfamily 1, group I, member 2), CRH (corticotropin releasing hormone), HTR1A (5-hydroxytryptamine (serotonin) receptor 1A), VDAC1 (voltage-dependent anion channel 1), HPSE (heparanase), SFTPD (surfactant protein D), TAP2 (transporter 2, ATP-binding cassette, sub-family B (MDR/TAP)), RNF123 (ring finger protein 123), PTK2B (PTK2B protein tyrosine kinase 2 beta), NTRK2 (neurotrophic tyrosine kinase, receptor, type 2), IL6R (interleukin 6 receptor), ACHE (acetylcholinesterase (Yt blood group)), GLP1R (glucagon-like peptide 1 receptor), GHR (growth hormone receptor), GSR (glutathione reductase), NQ01 (NAD(P)H dehydrogenase, quinone 1), NR5A1 (nuclear receptor subfamily 5, group A, member 1), GJB2 (gap junction protein, beta 2, 26 kDa), SLC9A1 (solute carrier family 9 (sodium/hydrogen exchanger), member 1), MAOA (monoamine oxidase A), PCSK9 (proprotein convertase subtilisin/kexin type 9), FCGR2A (Fc fragment of IgG, low affinity Ila, receptor (CD32)), SERPINF1 (serpin peptidase inhibitor, Glade F (alpha-2 antiplasmin, pigment epithelium derived factor), member 1), EDN3 (endothelin 3), DHFR (dihydrofolate reductase), GAS6 (growth arrest-specific 6), SMPD1 (sphingomyelin phosphodiesterase 1, acid lysosomal), UCP2 (uncoupling protein 2 (mitochondrial, proton carrier)), TFAP2A (transcription factor AP-2 alpha (activating enhancer binding protein 2 alpha)), C4BPA (complement component 4 binding protein, alpha), SERPINF2 (serpin peptidase inhibitor, Glade F (alpha-2 antiplasmin, pigment epithelium derived factor), member 2), TYMP (thymidine phosphorylase), ALPP (alkaline phosphatase, placental (Regan isozyme)), CXCR2 (chemokine (C-X-C motif) receptor 2), SLC39A3 (solute carrier family 39 (zinc transporter), member 3), ABCG2 (ATP-binding cassette, sub-family G (WHITE), member 2), ADA (adenosine deaminase), JAK3 (Janus kinase 3), HSPA1A (heat shock 70 kDa protein 1A), FASN (fatty acid synthase), FGF1 (fibroblast growth factor 1 (acidic)), Fll (coagulation factor XI), ATP7A (ATPase, Cu++ transporting, alpha polypeptide), CR1 (complement component (3b/4b) receptor 1 (Knops blood group)), GFAP (glial fibrillary acidic protein), ROCK1 (Rho-associated, coiled-coil containing protein kinase 1), MECP2 (methyl CpG binding protein 2 (Rett syndrome)), MYLK (myosin light chain kinase), BCF1E (butyrylcholinesterase), LIPE (lipase, hormone-sensitive), PRDX5 (peroxiredoxin 5), ADORA1 (adenosine A1 receptor), WRN (Werner syndrome, RecQ helicase-like), CXCR3 (chemokine (C-X-C motif) receptor 3), CD81 (CD81 molecule), SMAD7 (SMAD family member 7), LAMC2 (laminin, gamma 2), MAP3K5 (mitogen-activated protein kinase kinase kinase 5), CF1GA (chromogranin A (parathyroid secretory protein 1)), IAPP (islet amyloid polypeptide), RFIO (rhodopsin), ENPP1 (ectonucleotide pyrophosphatase/phosphodiesterase 1), PTF1LF1 (parathyroid hormone-like hormone), NRG1 (neuregulin 1), VEGFC (vascular endothelial growth factor C), ENPEP (glutamyl aminopeptidase (aminopeptidase A)), CEBPB (CCAAT/enhancer binding protein (C/EBP), beta), NAGLU (N-acetylglucosaminidase, alpha), F2RL3 (coagulation factor II (thrombin) receptor-like 3), CX3CL1 (chemokine (C-X3-C motif) ligand 1), BDKRB1 (bradykinin receptor Bl), ADAMTS13 (ADAM metallopeptidase with thrombospondin type 1 motif, 13), ELANE (elastase, neutrophil expressed), ENPP2 (ectonucleotide pyrophosphatase/phosphodiesterase 2), CISFl (cytokine inducible SF12-containing protein), GAST (gastrin), MYOC (myocilin, trabecular mesh work inducible glucocorticoid response), ATP1A2 (ATPase, Na+/K+ transporting, alpha 2 polypeptide), NF1 (neurofibromin 1), GJB1 (gap junction protein, beta 1, 32 kDa), MEF2A (myocyte enhancer factor 2A), VCL (vinculin), BMPR2 (bone morphogenetic protein receptor, type II (serine/threonine kinase)), TUBB (tubulin, beta), CDC42 (cell division cycle 42 (GTP binding protein, 25 kDa)), KRT18 (keratin 18), F1SF1 (heat shock transcription factor 1), MYB (v-myb myeloblastosis viral oncogene homolog (avian)), PRKAA2 (protein kinase, AMP-activated, alpha 2 catalytic subunit), ROCK2 (Rho-associated, coiled-coil containing protein kinase 2), TFPI (tissue factor pathway inhibitor (lipoprotein-associated coagulation inhibitor)), PRKG1 (protein kinase, cGMP-dependent, type I), BMP2 (bone morphogenetic protein 2), CTNND1 (catenin (cadherin-associated protein), delta 1), CTF1 (cystathionase (cystathionine gamma-lyase)), CTSS (cathepsin S), VAV2 (vav 2 guanine nucleotide exchange factor), NPY2R (neuropeptide Y receptor Y2), IGFBP2 (insulin-like growth factor binding protein 2, 36 kDa), CD28 (CD28 molecule), GSTA1 (glutathione S-transferase alpha 1), PPIA (peptidylprolyl isomerase A (cyclophilin A)), APOF1 (apolipoprotein FI (beta-2-glycoprotein I)), S100A8 (S100 calcium binding protein A8), IL11 (interleukin 11), ALOX15 (arachidonate 15-lipoxygenase), FBLN1 (fibulin 1), NR1F13 (nuclear receptor subfamily 1, group FI, member 3), SCD (stearoyl-CoA desaturase (delta-9-desaturase)), GIP (gastric inhibitory polypeptide), CF1 GB (chromogranin B (secretogranin 1)), PRKCB (protein kinase C, beta), SRD5A1 (steroid-5-alpha-reductase, alpha polypeptide 1 (3-oxo-5 alpha-steroid delta 4-dehydrogenase alpha 1)), F1SD11B2 (hydroxy steroid (11-beta) dehydrogenase 2), CALCRL (calcitonin receptor-like), GALNT2 (UDP-N-acetyl-alpha-D-galactosamine:polypeptide N-acetylgalactosaminyltransferase 2 (GalNAc-T2)), ANGPTL4 (angiopoietin-like 4), KCNN4 (potassium intermediate/small conductance calcium-activated channel, subfamily N, member 4), PIK3C2A (phosphoinositide-3-kinase, class 2, alpha polypeptide), HBEGF (heparin-binding EGF-like growth factor), CYP7A1 (cytochrome P450, family 7, subfamily A, polypeptide 1), HLA-DRB5 (major histocompatibility complex, class II, DR beta 5), BNIP3 (BCL2/adeno virus E1B 19 kDa interacting protein 3), GCKR (glucokinase (hexokinase 4) regulator), S100A12 (S100 calcium binding protein A 12), PADI4 (peptidyl arginine deaminase, type IV), HSPA14 (heat shock 70 kDa protein 14), CXCR1 (chemokine (C-X-C motif) receptor 1), H19 (H19, imprinted maternally expressed transcript (non-protein coding)), KRTAP19-3 (keratin associated protein 19-3), insulin, RAC2 (ras-related C3 botulinum toxin substrate 2 (rho family, small GTP binding protein Rac2)), RYR1 (ryanodine receptor 1 (skeletal)), CLOCK (clock homolog (mouse)), NGFR (nerve growth factor receptor (TNFR superfamily, member 16)), DBH (dopamine beta-hydroxylase (dopamine beta-monooxygenase)), CHRNA4 (cholinergic receptor, nicotinic, alpha 4), CACNA1C (calcium channel, voltage-dependent, L type, alpha 1C subunit), PRKAG2 (protein kinase, AMP-activated, gamma 2 non-catalytic subunit), CHAT (choline acetyltransferase), PTGDS (prostaglandin D2 synthase 21 kDa (brain)), NR1H2 (nuclear receptor subfamily 1, group H, member 2), TEK (TEK tyrosine kinase, endothelial), VEGFB (vascular endothelial growth factor B), MEF2C (myocyte enhancer factor 2C), MAPKAPK2 (mitogen-activated protein kinase-activated protein kinase 2), TNFRSF11 A (tumor necrosis factor receptor superfamily, member 11a, NFKB activator), HSPA9 (heat shock 70 kDa protein 9 (mortalin)), CYSLTR1 (cysteinyl leukotriene receptor 1), MAT1A (methionine adenosyltransferase I, alpha), OPRL1 (opiate receptor-like 1), IMPA1 (inositol(myo)-1(or 4)-monophosphatase 1), CLCN2 (chloride channel 2), DLD (dihydrolipoamide dehydrogenase), PSMA6 (proteasome (prosome, macropain) subunit, alpha type, 6), PSMB8 (proteasome (prosome, macropain) subunit, beta type, 8 (large multifunctional peptidase 7)), CHI3L1 (chitinase 3-like 1 (cartilage glycoprotein-39)), ALDH1B1 (aldehyde dehydrogenase 1 family, member B1), PARP2 (poly (ADP-ribose) polymerase 2), STAR (steroidogenic acute regulatory protein), LBP (lipopolysaccharide binding protein), ABCC6 (ATP-binding cassette, sub-family C(CFTR/MRP), member 6), RGS2 (regulator of G-protein signaling 2, 24 kDa), EFNB2 (ephrin-B2), cystic fibrosis transmembrane conductance regulator (CFTR), GJB6 (gap junction protein, beta 6, 30 kDa), APOA2 (apolipoprotein A-II), AMPD1 (adenosine monophosphate deaminase 1), DYSF (dysferlin, limb girdle muscular dystrophy 2B (autosomal recessive)), FDFT1 (farnesyl-diphosphate farnesyltransferase 1), EDN2 (endothelin 2), CCR6 (chemokine (C-C motif) receptor 6), GJB3 (gap junction protein, beta 3, 31 kDa), IL1RL1 (interleukin 1 receptor-like 1), ENTPD1 (ectonucleoside triphosphate diphosphohydrolase 1), BBS4 (Bardet-Biedl syndrome 4), CELSR2 (cadherin, EGF LAG seven-pass G-type receptor 2 (flamingo homolog, Drosophila)), F11R (F11 receptor), RAPGEF3 (Rap guanine nucleotide exchange factor (GEF) 3), HYAL1 (hyaluronoglucosaminidase 1), ZNF259 (zinc finger protein 259), ATOX1 (ATX1 antioxidant protein 1 homolog (yeast)), ATF6 (activating transcription factor 6), KEK (ketohexokinase (fructokinase)), SAT1 (spermidine/spermine N1-acetyltransferase 1), GGFI (gamma-glutamyl hydrolase (conjugase, folylpolygammaglutamyl hydrolase)), TIMP4 (TIMP metallopeptidase inhibitor 4), SLC4A4 (solute carrier family 4, sodium bicarbonate cotransporter, member 4), PDE2A (phosphodiesterase 2 A, cGMP-stimulated), PDE3B (phosphodiesterase 3B, cGMP-inhibited), FADS1 (fatty acid desaturase 1), FADS2 (fatty acid desaturase 2), TMSB4X (thymosin beta 4, X-linked), TXNIP (thioredoxin interacting protein), LIMS1 (LIM and senescent cell antigen-like domains 1), RFIOB (ras homolog gene family, member B), LY96 (lymphocyte antigen 96), FOXO1 (forkhead box 01), PNPLA2 (patatin-like phospholipase domain containing 2), TRH (thyrotropin-releasing hormone), GJC1 (gap junction protein, gamma 1, 45 kDa), SLC17A5 (solute carrier family 17 (anion/sugar transporter), member 5), FTO (fat mass and obesity associated), GJD2 (gap junction protein, delta 2, 36 kDa), PSRC1 (proline/serine-rich coiled-coil 1), CASP12 (caspase 12 (gene/pseudogene)), GPBAR1 (G protein-coupled bile acid receptor 1), PXK (PX domain containing serine/threonine kinase), IL33 (interleukin 33), TRIB1 (tribbles homolog 1 (Drosophila)), PBX4 (pre-B-cell leukemia homeobox 4), NUPR1 (nuclear protein, transcriptional regulator, 1), 15-Sep(15 kDa selenoprotein), CILP2 (cartilage intermediate layer protein 2), TERC (telomerase RNA component), GGT2 (gamma-glutamyltransf erase 2), MT-001 (mitochondrially encoded cytochrome c oxidase I), UOX (urate oxidase, pseudogene), a CRISPR/Cas effector polypeptide, an enzymatically active CRISPR/Cas effector polypeptide (e.g., is capable of cleaving a target nucleic acid) and a CRISPR/Cas effector polypeptide that is not enzymatically active (e.g., does not cleave a target nucleic acid, but retains binding to the target nucleic acid). In some cases, the donor DNA encodes a wild-type version of any of the foregoing polypeptides; i.e., the donor DNA can encode a “normal” version that does not include a mutation(s) that results in reduced function, lack of function, or pathogenesis.

[0408] In some cases, the donor DNA comprises a nucleotide sequence encoding a fluorescent polypeptide. Suitable fluorescent proteins include, but are not limited to, green fluorescent protein (GFP) or variants thereof, blue fluorescent variant of GFP (BFP), cyan fluorescent variant of GFP (CFP), yellow fluorescent variant of GFP (YFP), enhanced GFP (EGFP), enhanced CFP (ECFP), enhanced YFP (EYFP), GFPS65T, Emerald, Topaz (TYFP), Venus, Citrine, mCitrine, GFPuv, destabilized EGFP (dEGFP), destabilized ECFP (dECFP), destabilised EYFP (dEYFP), mCFPm, Cerulean, T-Sapphire, CyPet, YPet, mKO, HcRed, t-HcRed, DsRed, DsRed2, DsRed-monomer, J-Red, dimer2, t-dimer2(12), mRFP1, pocilloporin, Renilla GFP, Monster GFP, paGFP, Kaede protein and kindling protein, Phycobiliproteins and Phycobiliprotein conjugates including B-Phycoerythrin, R-Phycoerythrin and Allophycocyanin. Other examples of fluorescent proteins include mHoneydew, mBanana, mOrange, dTomato, tdTomato, mTangerine, mStrawberry, mCherry, mGrapel, mRaspberry, mGrape2, m PI urn (Shaner et al. (2005) Nat. Methods 2:905-909), and the like. Any of a variety of fluorescent and colored proteins from Anthozoan species, as described in, e.g., Matz et al. (1999) Nature Biotechnol. 17:969-973, can be encoded.

[0409] In some cases, the donor DNA encodes an RNA, e.g., an siRNA, a microRNA, a short hairpin RNA (shRNA), an anti-sense RNA, a riboswitch, a ribozyme, an aptamer, a ribosomal RNA, a transfer RNA, and the like.

[0410] A donor DNA can include, in addition to a nucleotide sequence encoding one or more gene products (e.g., an RNA and/or a polypeptide), one or more transcriptional control elements, e.g., a promoter, an enhancer, and the like. In some cases, the transcriptional control element is inducible. In some cases, the promoter is reversible. In some cases, the transcriptional control element is constitutive. In some cases, the promoter is functional in a eukaryotic cell. In some cases, the promoter is a cell type-specific promoter. In some cases, the promoter is a tissue-specific promoter.

[0411] The nucleotide sequence of the donor DNA is typically not identical to the target nucleic acid (e.g., genomic sequence) that it replaces. Rather, the donor DNA may contain at least one or more single base changes, insertions, deletions, inversions or rearrangements with respect to the target nucleic acid (e.g., genomic sequence), so long as sufficient homology is present to support homology-directed repair (e.g., for gene correction, e.g., to convert a disease-causing base pair or a non-disease-causing base pair). In some cases, the donor DNA comprises a non-homologous sequence flanked by two regions of homology, such that homology-directed repair between the target DNA region and the two flanking sequences results in insertion of the non-homologous sequence at the target region. Donor DNA may also comprise a vector backbone containing sequences that are not homologous to the DNA region of interest (the target nucleic acid) and that are not intended for insertion into the DNA region of interest (the target nucleic acid). Generally, the homologous region(s) of a donor sequence will have at least 50% sequence identity to a target nucleic acid (e.g., a genomic sequence) with which recombination is desired. In certain cases, 60%, 70%, 80%, 90%, 95%, 98%, 99%, or 99.9% sequence identity is present. Any value between 1% and 100% sequence identity can be present, depending upon the length of the donor polynucleotide.

[0412] The donor DNA may comprise certain nucleotide sequence differences as compared to the target nucleic acid (e.g., genomic sequence), where such difference include, e.g. restriction sites, nucleotide polymorphisms, selectable markers (e.g., drug resistance genes, fluorescent proteins, enzymes etc.), etc., which may be used to assess for successful insertion of the donor DNA at the cleavage site or in some cases may be used for other purposes (e.g., to signify expression at the targeted genomic locus). In some cases, if located in a coding region, such nucleotide sequence differences will not change the amino acid sequence, or will make silent amino acid changes (i.e., changes which do not affect the structure or function of the protein). Alternatively, these sequences differences may include flanking recombination sequences such as FLPs, loxP sequences, or the like, that can be activated at a later time for removal of the marker sequence. In some cases, the donor DNA will include one or more nucleotide sequences to aid in localization of the donor to the nucleus of the recipient cell or to aid in the integration of the donor DNA into the target nucleic acid. For example, in some case, the donor DNA may comprise one or more nucleotide sequences encoding one or more nuclear localization signals (e.g. PKKKRKV (SEQ ID NO:602), VSRKRPRP (SEQ ID NO:603), QRKRKQ (SEQ ID NO:604), and the like (Frietas et al (2009) Cun-Genomics 10:550-7). In some cases, the donor DNA will include nucleotide sequences to recruit DNA repair enzymes to increase insertion efficiency. Fiuman enzymes involved in homology directed repair include MRN-CtIP, BLM-DNA2, Exol, ERCC1, Rad51, Rad52, Ligase 1, RoIQ, PARP1, Ligase 3, BRCA2, RecQ/BLM-Torollla, RTEL, Roid, and Roth (Verma and Greenburg (2016) Genes Dev. 30 (10): 1138-1154). In some cases, the donor DNA is delivered as reconstituted chromatin (Cruz-Becerra and Kadonaga (2020) eLife 2020; 9:e55780 DOI: 10.7554/eLife.55780).

[0413] In some cases, the ends of the donor DNA are protected (e.g., from exonucleolytic degradation) by any convenient method and such methods are known to those of skill in the art. For example, one or more dideoxynucleotide residues can be added to the 3′ terminus of a linear molecule and/or self complementary oligonucleotides can be ligated to one or both ends. See, for example, Chang et al. (1987) Proc. Natl. Acad Sci USA 84:4959-4963; Nehls et al. (1996) Science 272:886-889. Additional methods for protecting exogenous polynucleotides from degradation include, but are not limited to, addition of terminal amino group(s) and the use of modified internucleotide linkages such as, for example, phosphorothioates, phosphoramidates, and O-methyl ribose or deoxyribose residues. As an alternative to protecting the termini of a linear donor DNA, additional lengths of sequence may be included outside of the regions of homology that can be degraded without impacting recombination.

### Linkers

[0414] In some embodiments, the Cas12a polypeptides are coupled to one or more accessory functions by a linker. Such accessory functions can include deaminases, nucleases, reverse transcriptases, and recombinases. One or more gRNAs directed to such promoters or enhancers may also be provided to direct the binding of the Cas12a polypeptide to such promoters or enhancers. The term linker as used in reference to a fusion protein refers to a molecule which joins the proteins to form a fusion protein. Generally, such molecules have no specific biological activity other than to join or to preserve some minimum distance or other spatial relationship between the proteins. However, in one embodiment, the linker may be selected to influence some property of the linker and/or the fusion protein such as the folding, net charge, or hydrophobicity of the linker.

[0415] Suitable linkers for use in the methods of the present invention are well known to those of skill in the art and include, but are not limited to, straight or branched-chain carbon linkers, heterocyclic carbon linkers, or peptide linkers. However, as used herein the linker may also be a covalent bond (carbon-carbon bond or carbon-heteroatom bond). In particular embodiments, the linker is used to separate the Cas12a polypeptide and an accessory protein (e.g., a nucleotide deaminase) by a distance sufficient to ensure that each protein retains its required functional property. Preferred peptide linker sequences adopt a flexible extended conformation and do not exhibit a propensity for developing an ordered secondary structure. In one embodiment, the linker can be a chemical moiety which can be monomeric, dimeric, multimeric or polymeric. Preferably, the linker comprises amino acids. Typical amino acids in flexible linkers include Gly, Asn and Ser.

[0416] Accordingly, in particular embodiments, the linker comprises a combination of one or more of Gly, Asn and Ser amino acids. Other near neutral amino acids, such as Thr and Ala, also may be used in the linker sequence. Exemplary linkers are disclosed in Maratea et al. (1985), Gene 40: 39-46; Murphy et al. (1986) Proc. Nat'l. Acad. Sci. USA 83: 8258-62; U.S. Pat. Nos. 4,935,233; and 4,751,180. For example, GlySer linkers may be based on repeating units of GGS, i.e., up to 2, 3, 4, 5, 6, 7, 8, 9, 10, 11 or even 12 or more repeating units, including but not limited to:

| SEQ | | |
|---|---|---|
| ID | Description | Sequence |
| | GlySer linker | GGS |
| | based on GGS | |
| | repeating unit | |
| 605 | GlySer linker | GGS GGS |
| | based on GGS | |
| | repeating unit | |
| 606 | GlySer linker | GGS GGS GGS |
| | based on GGS | |
| | repeating unit | |
| 607 | GlySer linker | GGS GGS GGS GGS |
| | based on GGS | |
| | repeating unit | |
| 608 | GlySer linker | GGS GGS GGS GGS GGS |
| | based on GGS | |
| | repeating unit | |
| 609 | GlySer linker | GGS GGS GGS GGS GGS GGS |
| | based on GGS | |
| | repeating unit | |
| 610 | GlySer linker | GGS GGS GGS GGS GGS GGS GGS |
| | based on GGS | |
| | repeating unit | |
| 611 | GlySer linker | GGS GGS GGS GGS GGS GGS GGS GGS |
| | based on GGS | |
| | repeating unit | |
| 612 | GlySer linker | GGS GGS GGS GGS GGS GGS GGS GGS GGS |
| | based on GGS | |
| | repeating unit | |
| 613 | GlySer linker | GGS GGS GGS GGS GGS GGS GGS GGS GGS GGS |
| | based on GGS | |
| | repeating unit | |
| 614 | GlySer linker | GGS GGS GGS GGS GGS GGS GGS GGS GGS GGS GGS |
| | based on GGS | |
| | repeating unit | |
| 615 | GlySer linker | GGS GGS GGS GGS GGS GGS GGS GGS GGS GGS GGS GGS |
| | based on GGS | |
| | repeating unit | |
| 616 | GlySer linker | GGS GGS GGS GGS GGS GGS GGS GGS GGS GGS GGS GGS GGS |
| | based on GGS | |
| | repeating unit | |
| 617 | GlySer linker | GGS GGS GGS GGS GGS GGS GGS GGS GGS GGS GGS GGS GGS GGS |
| | based on GGS | |
| | repeating unit | |
| 618 | GlySer linker | GGS GGS GGS GGS GGS GGS GGS GGS GGS GGS GGS GGS GGS GGS |
| | based on GGS | GGS |
| | repeating unit | |

[0417] In another example, GlySer linkers may be based on repeating units of GSG, i.e., up to 2, 3, 4, 5, 6, 7, 8, 9, 10, 11 or even 12 or more repeating units, including but not limited to:

| SEQ | | |
|---|---|---|
| ID | Description | Sequence |
| | GlySer linker | GSG |
| | based on GSG | |
| | repeating unit | |
| 619 | GlySer linker | GSG GSG |
| | based on GSG | |
| | repeating unit | |
| 620 | GlySer linker | GSG GSG GSG |
| | based on GSG | |
| | repeating unit | |
| 621 | GlySer linker | GSG GSG GSG GSG |
| | based on GSG | |
| | repeating unit | |
| 622 | GlySer linker | GSG GSG GSG GSG GSG |
| | based on GSG | |
| | repeating unit | |
| 623 | GlySer linker | GSG GSG GSG GSG GSG GSG |
| | based on GSG | |
| | repeating unit | |
| 624 | GlySer linker | GSG GSG GSG GSG GSG GSG GSG GSG |
| | based on GSG | |
| | repeating unit | |
| 625 | GlySer linker | GSG GSG GSG GSG GSG GSG GSG GSG GSG |
| | based on GSG | |
| | repeating unit | |
| 626 | GlySer linker | GSG GSG GSG GSG GSG GSG GSG GSG GSG GSG |
| | based on GSG | |
| | repeating unit | |
| 627 | GlySer linker | GSG GSG GSG GSG GSG GSG GSG GSG GSG GSG GSG |
| | based on GSG | |
| | repeating unit | |
| 628 | GlySer linker | GSG GSG GSG GSG GSG GSG GSG GSG GSG GSG GSG GSG |
| | based on GSG | |
| | repeating unit | |
| 629 | GlySer linker | GSG GSG GSG GSG GSG GSG GSG GSG GSG GSG GSG GSG GSG |
| | based on GSG | |
| | repeating unit | |
| 630 | GlySer linker | GSG GSG GSG GSG GSG GSG GSG GSG GSG GSG GSG GSG GSG GSG |
| | based on GSG | |
| | repeating unit | |
| 631 | GlySer linker | GSG GSG GSG GSG GSG GSG GSG GSG GSG GSG GSG GSG GSG GSG |
| | based on GSG | GSG |
| | repeating unit | |

[0418] In yet another example, GlySer linkers may be based on repeating units of GGGS, i.e., up to 2, 3, 4, 5, 6, 7, 8, 9, 10, 11 or even 12 or more repeating units, including but not limited to:

| SEQ | | |
|---|---|---|
| ID | Description | Sequence |
| 632 | GlySer linker | GGGS |
| | based on GGGS | |
| | repeating unit | |
| 633 | GlySer linker | GGGS GGGS |
| | based on GGGS | |
| | repeating unit | |
| 634 | GlySer linker | GGGS GGGS GGGS |
| | based on GGGS | |
| | repeating unit | |
| 635 | GlySer linker | GGGS GGGS GGGS GGGS |
| | based on GGGS | |
| | repeating unit | |
| 636 | GlySer linker | GGGS GGGS GGGS GGGS GGGS |
| | based on GGGS | |
| | repeating unit | |
| 637 | GlySer linker | GGGS GGGS GGGS GGGS GGGS GGGS |
| | based on GGGS | |
| | repeating unit | |
| 638 | GlySer linker | GGGS GGGS GGGS GGGS GGGS GGGS GGGS |
| | based on GGGS | |
| | repeating unit | |
| 639 | GlySer linker | GGGS GGGS GGGS GGGS GGGS GGGS GGGS GGGS |
| | based on GGGS | |
| | repeating unit | |
| 640 | GlySer linker | GGGS GGGS GGGS GGGS GGGS GGGS GGGS GGGS GGGS |
| | based on GGGS | |
| | repeating unit | |
| 641 | GlySer linker | GGGS GGGS GGGS GGGS GGGS GGGS GGGS GGGS GGGS GGGS |
| | based on GGGS | |
| | repeating unit | |
| 642 | GlySer linker | GGGS GGGS GGGS GGGS GGGS GGGS GGGS GGGS GGGS GGGS |
| | based on GGGS | GGGS |
| | repeating unit | |
| 643 | GlySer linker | GGGS GGGS GGGS GGGS GGGS GGGS GGGS GGGS GGGS GGGS |
| | based on GGGS | GGGS GGGS |
| | repeating unit | |
| 644 | GlySer linker | GGGS GGGS GGGS GGGS GGGS GGGS GGGS GGGS GGGS GGGS |
| | based on GGGS | GGGS GGGS GGGS |
| | repeating unit | |
| 645 | GlySer linker | GGGS GGGS GGGS GGGS GGGS GGGS GGGS GGGS GGGS GGGS |
| | based on GGGS | GGGS GGGS GGGS GGGS |
| | repeating unit | |
| 646 | GlySer linker | GGGS GGGS GGGS GGGS GGGS GGGS GGGS GGGS GGGS GGGS |
| | based on GGGS | GGGS GGGS GGGS GGGS GGGS |
| | repeating unit | |

[0419] In still another example, GlySer linkers may be based on repeating units of GGGGS, i.e., up to 2, 3, 4, 5, 6, 7, 8, 9, 10, 11 or even 12 or more repeating units, including but not limited to:

| SEQ | | |
|---|---|---|
| ID | Description | Sequence |
| 647 | GlySer linker | GGGGS |
| | based on GGGGS | |
| | repeating unit | |
| 648 | GlySer linker | GGGGS GGGGS |
| | based on GGGGS | |
| | repeating unit | |
| 649 | GlySer linker | GGGGS GGGGS GGGGS |
| | based on GGGGS | |
| | repeating unit | |
| 650 | GlySer linker | GGGGS GGGGS GGGGS GGGGS |
| | based on GGGGS | |
| | repeating unit | |
| 651 | GlySer linker | GGGGS GGGGS GGGGS GGGGS GGGGS |
| | based on GGGGS | |
| | repeating unit | |
| 652 | GlySer linker | GGGGS GGGGS GGGGS GGGGS GGGGS GGGGS |
| | based on GGGGS | |
| | repeating unit | |
| 653 | GlySer linker | GGGGS GGGGS GGGGS GGGGS GGGGS GGGGS GGGGS |
| | based on GGGGS | |
| | repeating unit | |
| 654 | GlySer linker | GGGGS GGGGS GGGGS GGGGS GGGGS GGGGS GGGGS GGGGS |
| | based on GGGGS | |
| | repeating unit | |
| 655 | GlySer linker | GGGGS GGGGS GGGGS GGGGS GGGGS GGGGS GGGGS GGGGS |
| | based on GGGGS | GGGGS |
| | repeating unit | |
| 656 | GlySer linker | GGGGS GGGGS GGGGS GGGGS GGGGS GGGGS GGGGS GGGGS |
| | based on GGGGS | GGGGS GGGGS |
| | repeating unit | |
| 657 | GlySer linker | GGGGS GGGGS GGGGS GGGGS GGGGS GGGGS GGGGS GGGGS |
| | based on GGGGS | GGGGS GGGGS GGGGS |
| | repeating unit | |
| 658 | GlySer linker | GGGGS GGGGS GGGGS GGGGS GGGGS GGGGS GGGGS GGGGS |
| | based on GGGGS | GGGGS GGGGS GGGGS GGGGS |
| | repeating unit | |
| 659 | GlySer linker | GGGGS GGGGS GGGGS GGGGS GGGGS GGGGS GGGGS GGGGS |
| | based on GGGGS | GGGGS GGGGS GGGGS GGGGS GGGGS |
| | repeating unit | |
| 660 | GlySer linker | GGGGS GGGGS GGGGS GGGGS GGGGS GGGGS GGGGS GGGGS |
| | based on GGGGS | GGGGS GGGGS GGGGS GGGGS GGGGS GGGGS |
| | repeating unit | |
| 661 | GlySer linker | GGGGS GGGGS GGGGS GGGGS GGGGS GGGGS GGGGS GGGGS |
| | based on GGGGS | GGGGS GGGGS GGGGS GGGGS GGGGS GGGGS GGGGS |
| | repeating unit | |

[0420] In yet a further embodiment, LEPGEKPYKCPECGKSFSQSGALTRHQRTHTR (SEQ ID NO:662) is used as a linker.

[0421] In yet an additional embodiment, the linker is an XTEN linker, which is TCGGGATCTGAGACGCCTGGGACCTCGGAATCGGCTACGCCCGAAAGT (SEQ ID NO:663). In particular embodiments, the Cas12a polypeptide is linked to the deaminase protein or its catalytic domain by means of an LEPGEKPYKCPECGKSFSQSGALTRHQRTHTR LEPGEKPYKCPECGKSFSQSGALTRHQRTHTR (SEQ ID NO:664) linker. In further particular embodiments, Cas12a polypeptide is linked C-terminally to the N-terminus of a deaminase protein or its catalytic domain by means of an LEPGEKPYKCPECGKSFSQSGALTRHQRTHTRLEPGEKPYKCPECGKSFSQSGALTRHQRTHTRL EPGEKPYKCPECGKSFSQSGALTRHQRTHTR (SEQ ID NO:665) linker. In addition, N- and C-terminal NLSs can also function as linker (e.g., PKKKRKVEASSPKKRKVEAS (SEQ ID NO:666)).

[0422] The above description of linkers is intended to be non-limiting and includes any combinations of the above linkers or heterologous combinations of repeating GlySer linkers.

[0423] The linker may be as simple as a covalent bond, or it may be a polymeric linker many atoms in length. In certain embodiments, the linker is a polypeptide or based on amino acids. In other embodiments, the linker is not peptide-like. In certain embodiments, the linker is a covalent bond (e.g., a carbon-carbon bond, disulfide bond, carbon-heteroatom bond, etc.). In certain embodiments, the linker is a carbon-nitrogen bond of an amide linkage. In certain embodiments, the linker is a cyclic or acyclic, substituted or unsubstituted, branched or unbranched aliphatic or heteroaliphatic linker. In certain embodiments, the linker is polymeric (e.g., polyethylene, polyethylene glycol, polyamide, polyester, etc.). In certain embodiments, the linker comprises a monomer, dimer, or polymer of aminoalkanoic acid. In certain embodiments, the linker comprises an aminoalkanoic acid (e.g., glycine, ethanoic acid, alanine, beta-alanine, 3-aminopropanoic acid, 4-aminobutanoic acid, 5-pentanoic acid, etc.). In certain embodiments, the linker comprises a monomer, dimer, or polymer of aminoHEXAnoic acid (Ahx). In certain embodiments, the linker is based on a carbocyclic moiety (e.g., cyclopentane, cycloHEXAne). In other embodiments, the linker comprises a polyethylene glycol moiety (PEG). In other embodiments, the linker comprises amino acids. In certain embodiments, the linker comprises a peptide. In certain embodiments, the linker comprises an aryl or heteroaryl moiety. In certain embodiments, the linker is based on a phenyl ring. The linker may included functionalized moieties to facilitate attachment of a nucleophile (e.g., thiol, amino) from the peptide to the linker. Any electrophile may be used as part of the linker. Exemplary electrophiles include, but are not limited to, activated esters, activated amides, Michael acceptors, alkyl halides, aryl halides, acyl halides, and isothiocyanates.

[0424] The linker can be, for example, a cleavable linker or protease-sensitive linker. In some embodiments, the linker is selected from the group consisting of F2A linker, P2A linker, T2A linker, E2A linker, and combinations thereof. This family of self-cleaving peptide linkers, referred to as 2A peptides, has been described in the art (see for example, Kim, J. H. et al. (2011) PLoS ONE 6:e18556). In some embodiments, the linker is an F2A linker. In some embodiments, the linker is a GGGS linker (SEQ ID NO:632). In some embodiments, the fusion protein contains three domains with intervening linkers, having the structure: domain-linker-domain-linker-domain.

[0425] Cleavable linkers known in the art may be used in connection with the disclosure. Exemplary such linkers include: F2A linkers, T2A linkers, P2A linkers, E2A linkers (See, e.g., WO2017127750). The skilled artisan will appreciate that other art-recognized linkers may be suitable for use in the constructs of the disclosure (e.g., encoded by the nucleic acids of the disclosure). The skilled artisan will likewise appreciate that other polycistronic constructs (mRNA encoding more than one nucleobase editing system component/polypeptide separately within the same molecule) may be suitable for use as provided herein.

### Nuclear Localization Domains

[0426] In various embodiments, the gene editing systems or any of the components thereof may fused to one or more nuclear localization sequences (NLSs), such as about or more than about 1, 2, 3, 4, 5, 6, 7, 8, 9, 10, or more NLSs. In one embodiment, a gene editor component (e.g., a nucleic acid programmable DNA binding protein or an editing accessory protein) comprises about or more than about 1, 2, 3, 4, 5, 6, 7, 8, 9, 10, or more NLSs at or near the amino-terminus, about or more than about 1, 2, 3, 4, 5, 6, 7, 8, 9, 10, or more NLSs at or near the carboxy-terminus, or a combination of these (e.g., zero or at least one or more NLS at the amino-terminus and zero or at one or more NLS at the carboxy terminus). When more than one NLS is present, each may be selected independently of the others, such that a single NLS may be present in more than one copy and/or in combination with one or more other NLSs present in one or more copies. In an embodiment of the invention, an editor component polypeptide comprises at most 6 NLSs. In one embodiment, an NLS is considered near the N- or C-terminus when the nearest amino acid of the NLS is within about 1, 2, 3, 4, 5, 10, 15, 20, 25, 30, 40, 50, or more amino acids along the polypeptide chain from the N- or C-terminus. Nonlimiting examples of NLSs include an NLS sequence derived from: the NLS of the SV40 virus large T-antigen, having the amino acid sequence PKKKRKV (SEQ ID NO:602); the NLS from nucleoplasmin (e.g. the nucleoplasmin bipartite NLS with the sequence KRPAATKKAGQAKKKK (SEQ ID NO:667); the c-myc NLS having the amino acid sequence PAAKRVKLD (SEQ ID NO:668) or RQRRNELKRSP (SEQ ID NO:669); the hRNPA1 M9 NLS having the sequence NQSSNFGPMKGGNFGGRSSGPYGGGGQYFAKPRNQGGY (SEQ ID NO:670); the sequence RMRIZFKNKGKDTAELRRRRVEVSVELRKAKKDEQILKRRNV (SEQ ID NO:671) of the IBB domain from importin-alpha; the sequences VSRKRPRP (SEQ ID NO:603) and PPKKARED (SEQ ID NO:672) of the myoma T protein; the sequence PQPKKKPL (SEQ ID NO:673) of human p53; the sequence SALIKKKKKMAP (SEQ ID NO:674) of mouse c-abl IV; the sequences DRLRR (SEQ ID NO:675) and PKQKKRK (SEQ ID NO:676) of the influenza virus NS 1; the sequence RKLKKKIKKL (SEQ ID NO:677) of the Hepatitis virus delta antigen; the sequence REKKKFLKRR (SEQ ID NO:678) of the mouse Mxl protein; the sequence KRKGDEVDGVDEVAKKKSKK (SEQ ID NO:679) of the human poly(ADP-ribose) polymerase; and the sequence RI<CLQAGMNLEARI<TI<I<(SEQ ID NO:680) of the steroid hormone receptors (human) glucocorticoid.

[0427] In general, the one or more NLSs are of sufficient strength to drive accumulation of the Cas12a polypeptide (or an NLS-modified accessory protein, or an NLS-modified chimera comprising a Cas12a protein and an accessory protein) in a detectable amount in the nucleus of a eukaryotic cell. In general, strength of nuclear localization activity may derive from the number of NLSs in the Cas12a polypeptide, the particular NLS(s) used, or a combination of these factors. Detection of accumulation in the nucleus may be performed by any suitable technique.

[0428] For example, a detectable marker may be fused to the Cas12a polypeptide, such that location within a cell may be visualized, such as in combination with a means for detecting the location of the nucleus (e.g., a stain specific for the nucleus such as DAPI). Cell nuclei may also be isolated from cells, the contents of which may then be analyzed by any suitable process for detecting protein, such as immunohistochemistry, Western blot, or enzyme activity assay. Accumulation in the nucleus may also be determined indirectly, such as by an assay for the effect of complex formation (e.g., assay for DNA cleavage or mutation at the target sequence, or assay for altered gene expression activity affected by complex formation and/or Cas12a polypeptide activity), as compared to a control no exposed to the Cas12a polypeptide or complex, or exposed to a Cas12a polypeptide lacking the one or more NLSs. In one embodiment of the herein described Cas12a polypeptide protein complexes and systems the codon optimized Cas12a polypeptide proteins comprise an NLS attached to the C-terminal of the protein. In one embodiment, other localization tags may be fused to the Cas12a polypeptide, such as without limitation for localizing the Cas12a polypeptide to particular sites in a cell, such as organelles, such as mitochondria, plastids, chloroplast, vesicles, golgi, (nuclear or cellular) membranes, ribosomes, nucleolus, ER, cytoskeleton, vacuoles, centrosome, nucleosome, granules, centrioles, etc.

[0429] In one embodiment of the invention, at least one nuclear localization signal (NLS) is attached to the nucleic acid sequences encoding the Cas12a polypeptide. In preferred embodiments at least one or more C-terminal or N-terminal NLSs are attached (and hence nucleic acid molecule(s) coding for the Cas12a polypeptide can include coding for NLS(s) so that the expressed product has the NLS(s) attached or connected). In a preferred embodiment a C-terminal NLS is attached for optimal expression and nuclear targeting in eukaryotic cells, preferably human cells. The invention also encompasses methods for delivering multiple nucleic acid components, wherein each nucleic acid component is specific for a different target locus of interest thereby modifying multiple target loci of interest. The nucleic acid component of the complex may comprise one or more protein-binding RNA aptamers. The one or more aptamers may be capable of binding a bacteriophage coat protein.

[0430] In other examples, the fusion proteins comprising Cas12a and another accessory protein (e.g., RT) contains one or more nuclear localization signals is selected or derived from SV40, c-Myc or NLP-1.

[0431] The NLS examples above are non-limiting. The Cas12a fusion proteins contemplated herein may comprise any known NLS sequence, including any of those described in Cokol et al., “Finding nuclear localization signals,” EMBO Rep., 2000, 1(5): 411-415 and Freitas et al., “Mechanisms and Signals for the Nuclear Import of Proteins,” Current Genomics, 2009, 10(8): 550-7, each of which are incorporated herein by reference.

### Tag Domains

[0432] In some embodiments, Cas12a editing system or a component thereof may comprise a polypeptide tag, such as an affinity tag (chitin binding protein (CBP), maltose binding protein (MBP), glutathione-S-transferase (GST), SBP-tag, Strep-tag, AviTag, Calmodulin-tag); solubilization tag; chromatography tag (polyanionic amino acid tag, such as FLAG-tag); epitope tag (short peptide sequences that bind to high-affinity antibodies, such as V5-tag, Myc-tag, VSV-tag, Xpress tag, E-tag, S-tag, and HA-tag); fluorescence tag (e.g., GFP). In some embodiments, the Cas12a editing system peptide may comprise an amino acid tag, such as one or more lysines, histidines, or glutamates, which can be added to the polypeptide sequences (e.g., at the N-terminal or C-terminal ends). Lysines can be used to increase peptide solubility or to allow for biotinylation. Protein and amino acid tags are peptide sequences genetically grafted onto a recombinant protein. Sequence tags are attached to proteins for various purposes, such as peptide purification, identification, or localization, for use in various applications including, for example, affinity purification, protein array, western blotting, immunofluorescence, and immunoprecipitation. Such tags are subsequently removable by chemical agents or by enzymatic means, such as by specific proteolysis or intein splicing.

[0433] Alternatively, amino acid residues located at the carboxy and amino terminal regions of the amino acid sequence of a peptide or protein may optionally be deleted providing for truncated sequences. Certain amino acids (e.g., C-terminal or N-terminal residues) may alternatively be deleted depending on the use of the sequence, as for example, expression of the sequence as part of a larger sequence which is soluble, or linked to a solid support.

### Aptamers

[0434] In particular embodiments, the nucleic acid components (e.g., guide RNA) of the Cas12a editing systems may further comprise a functional structure designed to improve nucleic acid component molecule structure, architecture, stability, genetic expression, or any combination thereof. Such a structure can include an aptamer.

[0435] Aptamers are biomolecules that can be designed or selected to bind tightly to other ligands, for example using a technique called systematic evolution of ligands by exponential enrichment (SELEX; Tuerk C, Gold L: “Systematic evolution of ligands by exponential enrichment: RNA ligands to bacteriophage T4 DNA polymerase.” Science 1990, 249:505-510). Nucleic acid aptamers can for example be selected from pools of random-sequence oligonucleotides, with high binding affinities and specificities for a wide range of biomedically relevant targets, suggesting a wide range of therapeutic utilities for aptamers (Keefe, Anthony D., Supriya Pai, and Andrew Ellington. “Aptamers as therapeutics.” Nature Reviews Drug Discovery 9.7 (2010): 537-550). These characteristics also suggest a wide range of uses for aptamers as drug delivery vehicles (Levy-Nissenbaum, Etgar, et al. “Nanotechnology and aptamers: applications in drug delivery.” Trends in biotechnology 26.8 (2008): 442-449; and, Hicke B J, Stephens A W. “Escort aptamers: a delivery service for diagnosis and therapy.” J Clin Invest 2000, 106:923-928.). Aptamers may also be constructed that function as molecular switches, responding to a que by changing properties, such as RNA aptamers that bind fluorophores to mimic the activity of green fluorescent protein (Paige, Jeremy S., Karen Y. Wu, and Sarnie R. Jaffrey. “RNA mimics of green fluorescent protein.” Science 333.6042 (2011): 642-646). It has also been suggested that aptamers may be used as components of targeted siRNA therapeutic delivery systems, for example targeting cell surface proteins (Zhou, Jiehua, and John J. Rossi. “Aptamer-targeted cell-specific RNA interference.” Silence 1.1 (2010): 4).

[0436] Accordingly, in particular embodiments, a Cas12a gene editing nucleic acid component is modified, e.g., by one or more aptamer(s) designed to improve RNA or DNA component molecule delivery, including delivery across the cellular membrane, to intracellular compartments, or into the nucleus. Such a structure can include, either in addition to the one or more aptamer(s) or without such one or more aptamer(s), moiety(ies) so as to render the nucleic acid component molecule deliverable, inducible or responsive to a selected effector. The invention accordingly comprehends a reRNA component molecule that responds to normal or pathological physiological conditions, including without limitation pH, hypoxia, oxygen concentration, temperature, protein concentration, enzymatic concentration, lipid structure, light exposure, mechanical disruption (e.g. ultrasound waves), magnetic fields, electric fields, or electromagnetic radiation.

Agents that Modulate DNA-Repair

[0437] In certain embodiments, the engineered Cas12a gene editing systems described herein (e.g., an engineered nucleic acid construct or engineered nucleic acid-enzyme construct described herein) further comprises or encodes a DNA-repair modulating biomolecule, which may further enhance the efficiency of integration of a transgene on the heterologous nucleic acid by homology dependent repair (HDR).

[0438] In certain embodiments, the DNA-repair modulating biomolecule comprises a Nonhomologous end joining (NHEJ) inhibitor.

[0439] In certain embodiments, the DNA-repair modulating biomolecule comprises a homologous directed repair (HDR) promoter.

[0440] In certain embodiments, the DNA-repair modulating biomolecule comprises a NHEJ inhibitor and an HDR promoter.

[0441] In certain embodiments, the DNA-repair modulating biomolecule enhances or improves more precise genome editing and/or the efficiency of homologous recombination, compared to the otherwise identical embodiment without the DNA-repair modulating biomolecule.

[0442] HDR promoters and/or NHEJ inhibitors can, in some embodiments, comprise one or more small molecules. Systems bearing recombination enhancers such as small molecules that activate HDR and suppress NHEJ locally at the genomic site of the DNA damage can be tailored in their placement on the engineered systems to further enhance their efficiency. In general, the small molecule recombination enhancers can be synthesized to bear linkers and a functional group, such as maleimide for reacting with a thiol group on a Cys residue of a protein, for chemical conjugation to the engineered systems. Use of commercially available functionalized PEG linkers (alkyne, azide, cyclooctyne etc.) can also be employed for conjugation, and orthogonal conjugation chemistries can be utilized for the multivalent display.

[0443] Conjugation sites can be readily identified where modifications do not affect the potency of the recombination enhancers selected.

[0444] In certain embodiments, multivalent display of one or more DNA-repair modulating biomolecule can be effected, including multiple moieties of NHEJ inhibitors, HDR promoters, or a combination thereof. See, for example, “Genomic targeting of epigenetic probes using a chemically tailored Cas9 system” by Liszczak et al., Proc Natl Acad Sci U.S.A. 114: 681-686, 2017 (incorporated herein by reference). In certain embodiments, multivalent display of small molecule compounds can be achieved through sortase loop proteins used as a scaffold for their display.

[0445] In some embodiments, the DNA-repair modulating biomolecule may comprise an HDR promoter. The HDR promoter may comprise small molecules, such as RSI or analogs thereof. In certain embodiments, the HDR promoter stimulates RAD51 activity or RAD52 motif protein 1 (RDM1) activity.

[0446] In certain embodiments, the HDR promoter comprises Nocodazole, which can result in higher HDR selection.

[0447] In certain embodiments, the HDR promoter may be administered prior to the delivery of the engineered TnpB systems described herein.

[0448] In certain embodiments, the HDR promoter locally enhances HDR without NHEJ inhibition. For example, RAD51 is a protein involved in strand exchange and the search for homology regions during HDR repair. In certain embodiments, the HDR promoter is phenylbenzamide RSI, identified as a small-molecule RAD51-stimulator (see WO2019/135816 at [0200]-[0204], specifically incorporated herein by reference).

[0449] In certain embodiments, the DNA-repair modulating biomolecule comprises C-terminal binding protein interacting protein (CtIP) or a functional fragment or homolog thereof. CtIP is a key protein in early steps of homologous recombination. According to this embodiment, the CtIP or the functional fragment or homolog thereof can be linked (e.g., fused) to the RT or the sequence-specific nuclease (e.g., a CRISPR/Cas effector enzyme, a ZFN, a TALEN, a meganuclease, TnpB, IscB, or a restriction endonuclease (RE)), and stimulates transgene integration by HDR.

[0450] In certain embodiments, the CtIP fragment is a minimal N-terminal fragment of the wild-type CtIP, such as the N-terminal fragment comprising residues 1-296 of the full-length CtIP (the HE for HDR enhancer), as described in Charpentier et al. (Nature Comm., DOI: 10.1038/s41467-018-03475-7, incorporated herein by reference), shown to be sufficient to stimulate HDR. The activity of the fragment depends on CDK phosphorylation sites (e.g., S233, T245, and S276) and the multimerization domain essential for CtIP activity in homologous recombination. Thus alternative fragments comprising the CDK phosphorylation sites and the multimerization domain essential for CtIP activity are also within the scope of the invention.

[0451] In certain embodiments, the DNA-repair modulating biomolecule comprises a dominant negative 53BP1.

[0452] In certain embodiments, the DNA-repair modulating biomolecule comprises a cell cycle-specific degradation tag, such as the degradation domain of the (human) Geminin, and the (murine) CyclinB2.

[0453] In certain embodiments, the DNA-repair modulating biomolecule comprises CyclinB2, a member of the B-type cyclins that associate with p34cdc2, and an essential component of the cell cycle regulatory machinery. CRISPR-mediated knock-in efficiency may be increased by promoting the relative increase in Cas9 activity in G2 phase of the cell cycle, when HDR is more active. In certain embodiments, the degradation domains of the (human) Geminin and (murine) CyclinB2 can be used as either N- or C-terminal fusion to serve as the DNA-repair modulating biomolecule. These domains are known to determine a cell-cycle specific profile of chimeric proteins, namely an increase in their relative concentration in S and G2 compared to G1, high jacking the conventional CyclinB2 and Geminin degradation pathways. This produces active Geminin-Cas9 and CyclinB2-Cas9 chimeric proteins, which are degraded in a cell-cycle-dependent manner. Such chimeras shift the repair of the DSBs to the HDR repair pathway compared to the commonly used Cas9.

[0454] While not wishing to be bound by particular theory, it is believed that the application of such cell cycle-specific degradation tags permits/promotes more efficient/secure gene editing.

[0455] In certain embodiments, the DNA-repair modulating biomolecule comprises a Rad family member protein, such as Rad50, Rad51, Rad52, etc., which functions to promote foreign DNA integration into a host chromosome. Specifically, Rad52 is an important homologous recombinant protein, and its complex with Rad51 plays a key role in HDR, mainly involved in the regulation of foreign DNA in eukaryotes. Key steps in the process of HR include repair mediated by Rad51 and strand exchange. Co-expression of Rad52 as a DNA-repair modulating biomolecule significantly enhances the likelihood of HDR by, e.g., three-fold.

[0456] In certain embodiments, the DNA-repair modulating biomolecule comprises a RAD52 protein as, e.g., either an N- or a C-terminal fusion.

[0457] In certain embodiments, the DNA-repair modulating biomolecule comprises a RAD52 motif protein 1 (RDM1) that functions similarly as RAD52. RDM1 has been shown to be able to repair DSBs caused by DNA replication, prevent G2 or M cell cycle arrest, and improve HDR selection.

[0458] In certain embodiments, the DNA-repair modulating biomolecule comprises a dominant negative version of the tumor suppressor p53-binding protein 1 (53BP1). The wild-type protein 53BP1 is a key regulator of the choice between NHEJ and HDR—it is a pro-NHEJ factor which limits HDR by blocking DNA end resection, and also by inhibiting BRCA1 recruitment to DSB sites. It has been shown that global inhibition of 53BP1 by a ubiquitin variant significantly improves Cas9-mediated HDR frequency in non-hematopoietic and hematopoietic cells with single-strand oligonucleotide delivery or double-strand donor in AAV.

[0459] In certain embodiments, the dominant negative (DN) version of the 53BP1 comprises the minimal focus forming region, but lacks domains outside this region, e.g., towards the N-terminus and tandem C-terminal BRCT repeats that recruit key effectors involved in NHEJ, such as RIFl-PTIP and EXPAND, respectively. The 53BP1 adapter protein is recruited to specific histone marks at sites of DSBs via this minimal focus forming region, which comprises several conserved domains including an oligomerization domain (OD), a glycine-arginine rich (GAR) motif, a Tudor domain, and an adjacent ubiquitin-dependent recruitment (UDR) motif. The Tudor domain mediates interactions with histone H4 dimethylated at K2023.

[0460] In certain embodiments, a dominant negative version of 53BP1 (DN1S) suppresses the accumulation of endogenous 53BP1 and downstream NHEJ proteins at sites of DNA damage, while upregulating the recruitment of the BRCA1 HDR protein. Such a DN version of the 53BP1 can be used as the DNA-repair modulating biomolecule, either as an N- or a C-terminal fusion (such as a Cas9 fusion, to locally inhibit NHEJ at the Cas9-target site defined by its gRNA, while promoting an increase in HDR, and does not globally affect NHEJ, thereby improving cell viability).

[0461] In certain embodiments, the DNA-repair modulating biomolecule comprises an NHEJ inhibitor, such as an inhibitor of DNA ligase IV, a KU inhibitor (e.g., KU70 or KU80), a DNA-PKc inhibitor, or an artemis inhibitor.

[0462] In certain embodiments, the NHEJ inhibitor inhibits the NHEJ pathway, enhances HDR, or modulates both. In certain embodiments, the NHEJ inhibitor is a small molecule inhibitor.

[0463] In certain embodiments, the small molecule inhibitor of the NHEJ pathway comprises an SCR7 analog, for example, PK66, PK76, PK409.

[0464] In certain embodiments, the NHEJ inhibitor comprises a KU inhibitor, for example, KU5788, and KU0060648.

[0465] In certain embodiments, a small molecule NHEJ inhibitor is linked to a polyglycine tripeptide through PEG for sortase-mediated ligation, as described in WO2019/135816, Guimaraes et al., Nat Protoc 8:1787-99, 2013; Theile et al., Nat Protoc 8:1800-7, 2013; and Schmohl et al., Curr Opin Chem Biol 22:122-8, 2014 (all incorporated herein by reference). The same means can also be used for attaching small molecule HDR enhancers to protein.

[0466] An exemplary method for conjugating a small molecule DNA-repair modulating biomolecule without loss of activity is described in WO2019135816, where SCR-7 conjugation of a poly-glycine peptide with the para-carboxylic moiety at ring 4 retained activity of the inhibitor, with rings 1, 2 and 3 of the molecule having involvement in the target-engagement, providing a simple and effective strategy to ligate a small molecule NHEJ inhibitor to the system described herein (e.g., to the sequence-specific nuclease including Cas enzymes, or to the RT) to precisely enhance HDR pathway near a nucleic acid target site.

[0467] In certain embodiments, a nucleic acid targeting moiety conjugates based on small molecule inhibitor of DNA-dependent protein kinase (DNA-PK) or heterodimeric Ku (KU70/KU80) can be utilized. KU-0060648 is one potent KU-inhibitors, which can also be functionalized with poly-glycine and used for recombination enhancement.

[0468] In certain embodiments, the DNA-repair modulating biomolecule comprises the Tumor Suppressor p53. p53 plays a direct role in DNA repair, including HR regulation, where it affects the extension of new DNA, thereby affecting HDR selection. In vivo, p53 binds to the nuclear matrix and is a rate-limiting factor in repairing DNA structure. p53 regulates DNA repair processes in almost all eukaryotes via transactivation-dependent and -independent pathways, but only the transactivation-independent function of p53 is involved in HR regulation. Wild-type p53 protein can link double stranded breaks to form intact DNA, as well as also playing a role in inhibiting NHEJ. p53 interacts with HR-related proteins, including Rad51, where it controls HR through direct interaction with Rad51.

### Accessory Domains

[0469] In other aspects, the Cas12a-based gene editing systems may comprise one or more additional accessory proteins having genome modifying functions, including recombinases, invertases, nucleases, polymerases, ligases, deaminases, reverse transcriptases, or epigenetic modifying functions. In various embodiments, the accessory proteins may be provided separately. In other embodiments, the accessory proteins may be fused to Cas12a, optionally with a linker.

[0470] The Cas12a-based gene editing systems may further comprise additional polypeptides polypeptides, proteins and/or peptides known in the art. Non-limiting categories of polypeptides include antigens, antibodies, antibody fragments, cytokines, peptides, hormones, enzymes, oxidants, antioxidants, synthetic polypeptides, and chimeric polypeptides, receptor, enzymes, hormones, transcription factors, ligands, membrane transporters, structural proteins, nucleases, or a component, variant or fragment (e.g., a biologically active fragment) thereof.

[0471] As used herein, the term “peptide” generally refers to shorter polypeptides of about 50 amino acids or less. Peptides with only two amino acids may be referred to as “dipeptides.” Peptides with only three amino acids may be referred to as “tripeptides.” Polypeptides generally refer to polypeptides with from about 4 to about 50 amino acids. Peptides may be obtained via any method known to those skilled in the art. In some embodiments, peptides may be expressed in culture. In some embodiments, peptides may be obtained via chemical synthesis (e.g., solid phase peptide synthesis).

[0472] In some embodiments, the RNA payloads (e.g., linear and/or circular mRNA payloads encoding one or more encoded products of interest or the non-coding RNAs such as guide RNAs) may encode a user-programmable DNA binding protein, or a gene editor accessory proteins, such as, but not limited to a deaminases, nucleases, transposases, polymerases, and reverse transcriptases, etc.

[0473] In some embodiments, the RNA payloads (e.g., linear and/or circular mRNA payloads encoding one or more encoded products of interest), e.g., the originator constructs and benchmark constructs described herein, may encode a simple protein associated with a non-protein. Non-limiting examples of conjugated proteins include, glycoproteins, hemoglobins, lecithoproteins, nucleoproteins, and phosphoproteins.

[0474] In some embodiments, the RNA payloads (e.g., linear and/or circular mRNA payloads encoding one or more encoded products of interest), e.g., the originator constructs and benchmark constructs described herein, may encode a protein that is derived from a simple or conjugated protein by chemical or physical means. Non-limiting examples of derived proteins include denatured proteins and peptides.

[0475] In some embodiments, the polypeptide, protein or peptide may be unmodified.

[0476] In some embodiments, the polypeptide, protein or peptide may be modified. Types of modifications include, but are not limited to, phosphorylation, glycosylation, acetylation, ubiquitylation/sumoylation, methylation, palmitoylation, quinone, amidation, myristoylation, pyrrolidone carboxylic acid, hydroxylation, phosphopantetheine, prenylation, GPI anchoring, oxidation, ADP-ribosylation, sulfation, S-nitrosylation, citrullination, nitration, gamma-carboxyglutamic acid, formylation, hypusine, topaquinone (TPQ), bromination, lysine topaquinone (LTQ), tryptophan tryptophylquinone (TTQ), iodination, and cysteine tryptophylquinone (CTQ). In some aspects, the polypeptide, protein or peptide may be modified by a post-transcriptional modification which can affect its structure, subcellular localization, and/or function.

[0477] In some embodiments, the polypeptide, protein or peptide may be modified using phosphorylation. Phosphorylation, or the addition of a phosphate group to serine, threonine, or tyrosine residues, is one of most common forms of protein modification. Protein phosphorylation plays an important role in fine tuning the signal in the intracellular signaling cascades.

[0478] In some embodiments, the polypeptide, protein or peptide may be modified using ubiquitination which is the covalent attachment of ubiquitin to target proteins. Ubiquitination-mediated protein turnover has been shown to play a role in driving the cell cycle as well as in protein-degradation-independent intracellular signaling pathways.

[0479] In some embodiments, the polypeptide, protein or peptide may be modified using acetylation and methylation which can play a role in regulating gene expression. As a non-limiting example, the acetylation and methylation could mediate the formation of chromatin domains (e.g., euchromatin and heterochromatin) which could have an impact on mediating gene silencing.

[0480] In some embodiments, the polypeptide, protein or peptide may be modified using glycosylation.

[0481] Glycosylation is the attachment of one of a large number of glycan groups and is a modification that occurs in about half of all proteins and plays a role in biological processes including, but not limited to, embryonic development, cell division, and regulation of protein structure. The two main types of protein glycosylation are N-glycosylation and O-glycosylation. For N-glycosylation the glycan is attached to an asparagine and for O-glycosylation the glycan is attached to a serine or threonine.

[0482] In some embodiments, the polypeptide, protein or peptide may be modified using sumoylation. Sumoylation is the addition of SUMOs (small ubiquitin-like modifiers) to proteins and is a post-translational modification similar to ubiquitination.

[0483] In other embodiments, the RNA payloads (e.g., linear and/or circular mRNA payloads encoding one or more encoded products of interest), e.g., the originator constructs and benchmark constructs described herein, may encode a therapeutic protein, such as those exemplified below.

[0484] In other embodiments, the RNA payloads (e.g., linear and/or circular mRNA payloads encoding one or more products of interest), e.g., the originator constructs and benchmark constructs described herein, may encode a gene editing system, such as those exemplified herein. As used herein, a “nucleobase editing system” is a protein, DNA, or RNA composition capable of making edits, modifications or alterations to one or more targeted genes of interest. According to the present invention, one or more nucleobase editing system currently being marketed or in development may be encoded by the RNA payloads (e.g., linear and/or circular mRNA payloads encoding one or more encoded products of interest) described herein of the present invention.

### Inducibility Modifications

[0485] In one embodiment, a Cas12a polypeptide may form a component of an inducible gene editing system. The inducible nature of the system would allow for spatiotemporal control of gene editing or gene expression using a form of energy. The form of energy may include but is not limited to electromagnetic radiation, sound energy, chemical energy and thermal energy. Examples of inducible system include tetracycline inducible promoters (Tet-On or Tet-Off), small molecule two-hybrid transcription activations systems (FKBP, ABA, etc.), or light inducible systems (Phytochrome, LOV domains, or cryptochrome). In one embodiment, the TnpB polypeptide may be a part of a Light Inducible Transcriptional Effector (LITE) to direct changes in transcriptional activity in a sequence-specific manner. The components of a light may include a TnpB polypeptide, a light-responsive cytochrome heterodimer (e.g. from Arabidopsis thaliana), and a transcriptional activation/repression domain. Further examples of inducible DNA binding proteins and methods for their use are provided in US Provisional Application Nos. 61/736,465 and U.S. 61/721,283, and International Patent Publication No. WO 2014/018423 A2 which is hereby incorporated by reference in its entirety.

[0486] Once all copies of a gene in the genome of a cell have been edited, continued expression of the system in that cell is no longer necessary. Indeed, sustained expression would be undesirable in case of off-target effects at unintended genomic sites, etc. Thus time-limited expression would be useful. Inducible expression offers one approach, but in addition Applicants have engineered a self-inactivating system that relies on the use of a non-coding nucleic acid component molecule target sequence within the vector itself. Thus, after expression begins, the system will lead to its own destruction, but before destruction is complete it will have time to edit the genomic copies of the target gene (which, with a normal point mutation in a diploid cell, requires at most two edits). Simply, the self-inactivating system includes additional RNA (e.g., nucleic acid component molecule) that targets the coding sequence for the Cas12a polypeptide itself or that targets one or more non-coding nucleic acid component molecule target sequences complementary to unique sequences present in one or more of the following: (a) within the promoter driving expression of the non-coding RNA elements, (b) within the promoter driving expression of the Cas12a polypeptide gene, (c) within 100 bp of the ATG translational start codon in the Cas12a polypeptide coding sequence, (d) within the inverted terminal repeat (iTR) of a viral delivery vector, e.g., in the AAV genome.

[0487] In some aspects, a single nucleic acid component molecule is provided that is capable of hybridization to a sequence downstream of a Cas12a polypeptide start codon, whereby after a period of time there is a loss of the Cas12a polypeptide expression. In some aspects, one or more nucleic acid component molecule(s) are provided that are capable of hybridization to one or more coding or non-coding regions of the polynucleotide encoding the system, whereby after a period of time there is a inactivation of one or more, or in some cases all, of the system. In some aspects of the system, and not to be limited by theory, the cell may comprise a plurality of complexes, wherein a first subset of complexes comprise a first nucleic acid component molecule capable of targeting a genomic locus or loci to be edited, and a second subset of complexes comprise at least one second nucleic acid component molecule capable of targeting the polynucleotide encoding the system, wherein the first subset of complexes mediate editing of the targeted genomic locus or loci and the second subset of complexes eventually inactivate the system, thereby inactivating further expression in the cell.

[0488] The various coding sequences (Cas12a polypeptide and nucleic acid component molecule) can be included on a single vector or on multiple vectors. For instance, it is possible to encode the enzyme on one vector and the various RNA sequences on another vector, or to encode the enzyme and one nucleic acid component molecule on one vector, and the remaining nucleic acid component molecule on another vector, or any other permutation. In general, a system using a total of one or two different vectors is preferred.

### Optional Editing System Formats

[0489] In various embodiments, the Cas12a-based gene editing systems may comprise one or more additional accessory proteins having genome modifying functions, including recombinases, invertases, nucleases, polymerases, ligases, deaminases, reverse transcriptases, or epigenetic modifying functions. In various embodiments, the accessory proteins may be provided separately. In other embodiments, the accessory proteins may be fused to Cas12a, optionally with a linker.

### Cas12a (Cas Type V) Base Editor Format

[0490] In some embodiments, the Cas12a-based gene editing system is combined with one or more deaminases to produce a base editor. In some embodiments, the deaminase is fused, optionally via a linker, to a component of the Cas12a-based gene editing system. For example, the deaminase might be coupled or fused to a Cas12a domain via a linker.

[0491] Base editing was first described in Komor et al., “Programmable editing of a target base in genomic DNA without double-stranded DNA cleavage,” Nature, May 19, 2016, 533 (7603); pp. 420-424 in the form of cytosine base editors or CBEs followed by the disclosure of Gaudelli et al., “Programmable base editing of A-T to G-C in genomic DNA without DNA cleavage,” Nature, Vol. 551, pp. 464-471 describing adenine base editors or ABEs. Subsequently, base editing has been described in numerous scientific publications, including, but not limited to (i) Kim J S. Precision genome engineering through adenine and cytosine base editing. Nat Plants. 2018 March; 4(3):148-151. doi: 10.1038/s41477-018-0115-z. Epub 2018 Feb. 26. PMID: 29483683.; (ii) Wei Y, Zhang X H, Li D L. The “new favorite” of gene editing technology-single base editors. Yi Chuan. 2017 Dec. 20; 39(12):1115-1121. doi: 10.16288/j.yczz.17-389. PMID: 29258982; (iii) Tang J, Lee T, Sun T. Single-nucleotide editing: From principle, optimization to application. Hum Mutat. 2019 December; 40(12):2171-2183. doi: 10.1002/humu.23819. Epub 2019 Sep. 15. PMID: 31131955; PMCID: PMC6874907; (iv) Grunewald J, Zhou R, Lareau C A, Garcia S P, Iyer S, Miller B R, Langner L M, Hsu J Y, Aryee M J, Joung J K. A dual-deaminase CRISPR base editor enables concurrent adenine and cytosine editing. Nat Biotechnol. 2020 July; 38(7):861-864. doi: 10.1038/s41587-020-0535-y. Epub 2020 Jun. 1. PMID: 32483364; PMCID: PMC7723518; (v) Sakata R C, Ishiguro S, Mori H, Tanaka M, Tatsuno K, Ueda H, Yamamoto S, Seki M, Masuyama N, Nishida K, Nishimasu H, Arakawa K, Kondo A, Nureki O, Tomita M, Aburatani H, Yachie N. Base editors for simultaneous introduction of C-to-T and A-to-G mutations. Nat Biotechnol. 2020 July; 38(7):865-869. doi: 10.1038/s41587-020-0509-0. Epub 2020 Jun. 2. Erratum in: Nat Biotechnol. 2020 Jun. 5; PMID: 32483365; (vi) Fan J, Ding Y, Ren C, Song Z, Yuan J, Chen Q, Du C, Li C, Wang X, Shu W. Cytosine and adenine deaminase base-editors induce broad and nonspecific changes in gene expression and splicing. Commun Biol. 2021 Jul. 16; 4(1):882. doi: 10.1038/s42003-021-02406-5. PMID: 34272468; PMCID: PMC8285404; (vii) Zhang S, Yuan B, Cao J, Song L, Chen J, Qiu J, Qiu Z, Zhao X M, Chen J, Cheng T L. TadA orthologs enable both cytosine and adenine editing of base editors. Nat Commun. 2023 Jan. 26; 14(1):414. doi: 10.1038/s41467-023-36003-3. PMID: 36702837; PMCID: PMC988000; and (viii) Zhang S, Song L, Yuan B, Zhang C, Cao J, Chen J, Qiu J, Tai Y, Chen J, Qiu Z, Zhao X M, Cheng T L. TadA reprogramming to generate potent miniature base editors with high precision. Nat Commun. 2023 Jan. 26; 14(1):413. doi: 10.1038/s41467-023-36004-2. PMID: 36702845; PMCID: PMC987999, each of which are incorporated herein by reference in their entireties.

[0492] Amino acid and nucleotide sequences of base editors, including adenosine base editors, cytidine base editors, and others are readily available in the art. For example, exemplary base editors that may be delivered using the LNP compositions described herein can be found in the following published patent applications, each of their contents (including any and all biological sequences) are incorporated herein by reference:

| | |
|---|---|
| US 2023/0021641 A1 | CAS9 VARIANTS HAVING NON- |
| | CANONICAL PAM SPECIFICITIES AND |
| | USES THEREOF |
| U.S. Pat. No. | CYTOSINE TO GUANINE BASE EDITOR |
| 11,542,496 B2 | |
| U.S. Pat. No. | INCORPORATION OF UNNATURAL AMINO |
| 11,542,509 B2 | ACIDS INTO PROTEINS USING BASE |
| | EDITING |
| US 2022/0315906 A1 | BASE EDITORS WITH DIVERSIFIED |
| | TARGETING SCOPE |
| US 2022/0282275 A1 | G-TO-T BASE EDITORS AND USES |
| | THEREOF |
| US 2022/0249697 A1 | AAV DELIVERY OF NUCLEOBASE EDITORS |

[0493] Base editing does not require double-stranded DNA breaks or a DNA donor template. In some embodiments, base editing comprises creating an SSB in a target double-stranded DNA sequence and then converting a nucleobase. In some embodiments, the nucleobase conversion is an adenosine to a guanine. In some embodiments, the nucleobase conversion is a thymine to a cytosine. In some embodiments, the nucleobase conversion is a cytosine to a thymine. In some embodiments, the nucleobase conversion is a guanine to an adenosine. In some embodiments, the nucleobase conversion is an adenosine to inosine. In some embodiments, the nucleobase conversion is a cytosine to uracil.

[0494] A base editing system comprises a base editor which can convert a nucleobase. The base editor (“BE”) comprises a partially inactive Cas12a protein which is connected to a deaminase that precisely and permanently edits a target nucleobase in a polynucleotide sequence. A base editor comprises a polynucleotide programmable nucleotide binding domain and a nucleobase editing domain (e.g., adenosine deaminase or cytosine deaminase). In some embodiments, the partially inactive Cas12a protein is a Cas12a nickase. In some embodiments, the partially inactive Cas protein is a Cas12a nickase (also referred to as “nCas12a”).

[0495] A polynucleotide programmable nucleotide binding domain, when in conjunction with a bound guide polynucleotide (e.g., gRNA), can specifically bind to a target polynucleotide sequence (i.e., via complementary base pairing between bases of the bound guide nucleobase and bases of the target polynucleotide sequence) and thereby localize the nucleobase editor to the target polynucleotide sequence desired to be edited. In some embodiments, the target polynucleotide sequence comprises single-stranded DNA or double-stranded DNA. In some embodiments, the target polynucleotide sequence comprises RNA. In some embodiments, the target polynucleotide sequence comprises a DNA-RNA hybrid.

[0496] In certain embodiments, polynucleotide programmable nucleotide binding domains also include nucleobase programmable proteins that bind RNA. In certain embodiments, the polynucleotide programmable nucleotide binding domain can be associated with a nucleobase that guides the polynucleotide programmable nucleotide binding domain to an RNA.

### Cas12a (Cas Type V) CBEs

[0497] In some embodiments, the Cas12a base editors contemplated herein may comprise a deaminase domain that is a cytidine deaminase domain. A cytidine deaminase domain may also be referred to interchangeably as a cytosine deaminase domain. In some embodiments, the cytidine deaminase catalyzes the hydrolytic deamination of cytidine (C) or deoxycytidine (dC) to uridine (U) or deoxyuridine (dU), respectively. In some embodiments, the cytidine deaminase domain catalyzes the hydrolytic deamination of cytosine (C) to uracil (U). In some embodiments, the cytidine deaminase catalyzes the hydrolytic deamination of cytidine or cytosine in deoxyribonucleic acid (DNA). Without wishing to be bound by any particular theory, fusion proteins comprising a cytidine deaminase are useful inter alia for targeted editing, referred to herein as “base editing,” of nucleic acid sequences in vitro and in vivo.

[0498] One exemplary suitable type of cytidine deaminase is a cytidine deaminase, for example, of the APOBEC family. The apolipoprotein B mRNA-editing complex (APOBEC) family of cytidine deaminase enzymes encompasses eleven proteins that serve to initiate mutagenesis in a controlled and beneficial manner (see, e.g., Conticello S G. The AID/APOBEC family of nucleic acid mutators. Genome Biol. 2008; 9(6):229). One family member, activation-induced cytidine deaminase (AID), is responsible for the maturation of antibodies by converting cytosines in ssDNA to uracils in a transcription-dependent, strand-biased fashion (see, e.g., Reynaud C A, et al. What role for AID: mutator, or assembler of the immunoglobulin mutasome, Nat Immunol. 2003; 4(7):631-638). The apolipoprotein B editing complex 3 (APOBEC3) enzyme provides protection to human cells against a certain HIV-1 strain via the deamination of cytosines in reverse-transcribed viral ssDNA (see, e.g., Bhagwat A S. DNA-cytosine deaminases: from antibody maturation to antiviral defense. DNA Repair (Amst). 2004; 3(1):85-89).

[0499] Some aspects of this disclosure relate to the recognition that the activity of cytidine deaminase enzymes such as APOBEC enzymes can be directed to a specific site in genomic DNA. Without wishing to be bound by any particular theory, advantages of using a nucleic acid programmable binding protein (e.g., a Cas9 domain) as a recognition agent include (1) the sequence specificity of nucleic acid programmable binding protein (e.g., a Cas9 domain) can be easily altered by simply changing the sgRNA sequence; and (2) the nucleic acid programmable binding protein (e.g., a Cas9 domain) may bind to its target sequence by denaturing the dsDNA, resulting in a stretch of DNA that is single-stranded and therefore a viable substrate for the deaminase. It should be understood that other catalytic domains of napDNAbps, or catalytic domains from other nucleic acid editing proteins, can also be used to generate fusion proteins with Cas9, and that the disclosure is not limited in this regard.

[0500] In some embodiments, the cytidine deaminase is an apolipoprotein B mRNA-editing complex (APOBEC) family deaminase. In some embodiments, the cytidine deaminase is an APOBEC1 deaminase. In some embodiments, the cytidine deaminase is an APOBEC2 deaminase. In some embodiments, the cytidine deaminase is an APOBEC3 deaminase. In some embodiments, the cytidine deaminase is an APOBEC3A deaminase. In some embodiments, the cytidine deaminase is an APOBEC3B deaminase. In some embodiments, the cytidine deaminase is an APOBEC3C deaminase. In some embodiments, the cytidine deaminase is an APOBEC3D deaminase. In some embodiments, the cytidine deaminase is an APOBEC3E deaminase. In some embodiments, the cytidine deaminase is an APOBEC3F deaminase. In some embodiments, the cytidine deaminase is an APOBEC3G deaminase. In some embodiments, the cytidine deaminase is an APOBEC3H deaminase. In some embodiments, the cytidine deaminase is an APOBEC4 deaminase. In some embodiments, the cytidine deaminase is an activation-induced deaminase (AID). In some embodiments, the cytidine deaminase is a vertebrate cytidine deaminase. In some embodiments, the cytidine deaminase is an invertebrate cytidine deaminase. In some embodiments, the cytidine deaminase is a human, chimpanzee, gorilla, monkey, cow, dog, rat, or mouse deaminase. In some embodiments, the cytidine deaminase is a human cytidine deaminase. In some embodiments, the cytidine deaminase is a rat cytidine deaminase, e.g., rAPOBEC1.

[0501] In some embodiments, the nucleic acid editing domain is at least 80%, at least 85%, at least 90%, at least 92%, at least 95%, at least 96%, at least 97%, at least 98%, at least 99%, or at least 99.5% identical to any of the cytidine deaminase domain examples above.

### Cas12a (Cas Type V) ABEs

[0502] In other embodiments, the Cas12a base editors contemplated herein may comprise a deaminase domain that is an adenosine deaminase domain. The disclosure provides fusion proteins that comprise one or more adenosine deaminases. In some aspects, such fusion proteins are capable of deaminating adenosine in a nucleic acid sequence (e.g., DNA or RNA). As one example, any of the fusion proteins provided herein may be base editors, (e.g., adenine base editors). Without wishing to be bound by any particular theory, dimerization of adenosine deaminases (e.g., in cis or in trans) may improve the ability (e.g., efficiency) of the fusion protein to modify a nucleic acid base, for example to deaminate adenine. In some embodiments, any of the fusion proteins may comprise 2, 3, 4 or 5 adenosine deaminases. In some embodiments, any of the fusion proteins provided herein comprise two adenosine deaminases. Exemplary, non-limiting, embodiments of adenosine deaminases are provided herein. It should be appreciated that the mutations provided herein (e.g., mutations in ecTadA) may be applied to adenosine deaminases in other adenosine base editors, for example those provided in U.S. Patent Publication No. 2018/0073012, published Mar. 15, 2018, which issued as U.S. Pat. No. 10,113,163, on Oct. 30, 2018; U.S. Patent Publication No. 2017/0121693, published May 4, 2017, which issued as U.S. Pat. No. 10,167,457 on Jan. 1, 2019; International Publication No. WO 2017/070633, published Apr. 27, 2017; U.S. Patent Publication No. 2015/0166980, published Jun. 18, 2015; U.S. Pat. No. 9,840,699, issued Dec. 12, 2017; and U.S. Pat. No. 10,077,453, issued Sep. 18, 2018, all of which are incorporated herein by reference in their entireties.

[0503] In some embodiments, any of the adenosine deaminases provided herein is capable of deaminating adenine. In some embodiments, the adenosine deaminases provided herein are capable of deaminating adenine in a deoxyadenosine residue of DNA. The adenosine deaminase may be derived from any suitable organism (e.g., E. coli). In some embodiments, the adenosine deaminase is a naturally-occurring adenosine deaminase that includes one or more mutations corresponding to any of the mutations provided herein (e.g., mutations in ecTadA). One of skill in the art will be able to identify the corresponding residue in any homologous protein and in the respective encoding nucleic acid by methods well known in the art, e.g., by sequence alignment and determination of homologous residues. Accordingly, one of skill in the art would be able to generate mutations in any naturally-occurring adenosine deaminase (e.g., having homology to ecTadA) that corresponds to any of the mutations described herein, e.g., any of the mutations identified in ecTadA. In some embodiments, the adenosine deaminase is from a prokaryote. In some embodiments, the adenosine deaminase is from a bacterium. In some embodiments, the adenosine deaminase is from Escherichia coli, Staphylococcus aureus, Salmonella typhi, Shewanella putrefaciens, Haemophilus influenzae, Caulobacter crescentus, or Bacillus subtilis. In some embodiments, the adenosine deaminase is from E. coli.

[0504] Any two or more of the adenosine deaminases described herein may be connected to one another (e.g. by a linker) within an adenosine deaminase domain of the fusion proteins provided herein. For instance, the fusion proteins provided herein may contain only two adenosine deaminases. In some embodiments, the adenosine deaminases are the same. In some embodiments, the adenosine deaminases are any of the adenosine deaminases provided herein. In some embodiments, the adenosine deaminases are different. In some embodiments, the first adenosine deaminase is any of the adenosine deaminases provided herein, and the second adenosine is any of the adenosine deaminases provided herein, but is not identical to the first adenosine deaminase. In some embodiments, the fusion protein comprises two adenosine deaminases (e.g., a first adenosine deaminase and a second adenosine deaminase). In some embodiments, the fusion protein comprises a first adenosine deaminase and a second adenosine deaminase. In some embodiments, the first adenosine deaminase is N-terminal to the second adenosine deaminase in the fusion protein. In some embodiments, the first adenosine deaminase is C-terminal to the second adenosine deaminase in the fusion protein. In some embodiments, the first adenosine deaminase and the second deaminase are fused directly or via a linker.

[0505] In some embodiments, the base editor comprises a deaminase enzyme. In some embodiments, the base editor comprises a cytidine deaminase. In some embodiments, the base editor comprises a Cas9 protein fused to a cytidine deaminase enzyme. In some embodiments, the base editor comprises an adenosine deaminase. In some embodiments, the base editor comprises a Cas9 protein fused to an adenosine deaminase enzyme.

[0506] In some embodiments, the base editing system comprises an uracil glycosylase inhibitor. In some embodiments, the base editing system comprises a Cas9 protein fused to an uracil glycosylase inhibitor. In some embodiments, the cargo comprises an uracil glycosylase inhibitor or a polynucleotide encoding an uracil glycosylase inhibitor. In some embodiments, the cargo comprises a Cas9 protein fused to an uracil glycosylase inhibitor or a polynucleotide encoding a Cas9 protein fused to an uracil glycosylase inhibitor.

[0507] A variety of nucleobase modifying enzymes are suitable for use in the nucleobase systems disclosed herein. In some embodiments, the nucleobase modifying enzyme is a RNA base editor. In some embodiments, the RNA base editor can be a cytidine deaminase, which converts cytidine into uridine. Non-limiting examples of cytidine deaminases include cytidine deaminase 1 (CDA1), cytidine deaminase 2 (CDA2), activation-induced cytidine deaminase (AICDA), apolipoprotein B mRNA-editing complex (APOBEC) family cytidine deaminase (e.g., APOBEC1, APOBEC2, APOBEC3A, APOBEC3B, APOBEC3C, APOBEC3D/E, APOBEC3F, APOBEC3G, APOBEC3H, APOBEC4), APOBEC1 complementation factor/APOBEC1 stimulating factor (ACF1/ASF) cytidine deaminase, cytosine deaminase acting on RNA (CDAR), bacterial long isoform cytidine deaminase (CDDL), and cytosine deaminase acting on tRNA (CDAT). In other embodiments, the RNA base editor can be an adenosine deaminase, which converts adenosine into inosine, which is read by polymerase enzymes as guanosine. In certain embodiments, adenosine deaminases include tRNA adenine deaminase, adenosine deaminase, adenosine deaminase acting on RNA (ADAR), and adenosine deaminase acting on tRNA (ADAT).

[0508] In some embodiments, in the nucleobase editing systems disclosed herein, the Cas effector may associate with one or more functional domains (e.g., via fusion protein or suitable linkers). In some embodiments, the effector domain comprises one or more cytindine or nucleotide deaminases that mediate editing of via hydrolytic deamination. In certain embodiments, the effector domain comprises the adenosine deaminase acting on RNA (ADAR) family of enzymes. In certain embodiments, the adenosine deaminase protein or catalytic domain thereof capable of deaminating adenosine or cytidine in RNA or is an RNA specific adenosine deaminase and/or is a bacterial, human, cephalopod, or Drosophila adenosine deaminase protein or catalytic domain thereof, preferably TadA, more preferably ADAR, optionally huADAR, optionally (hu)ADAR1 or (hu)ADAR2, preferably huADAR2 or catalytic domain thereof.

[0509] In some embodiments, the cytidine deaminase is a human, rat or lamprey cytidine deaminase. In some embodiments, the cytidine deaminase is an apolipoprotein B mRNA-editing complex (APOBEC) family deaminase, an activation-induced deaminase (AID), or a cytidine deaminase 1 (CDA1).

[0510] In certain embodiments, the adenosine deaminase is adenosine deaminase acting on RNA (ADAR). In certain embodiments, the ADAR is ADAR (ADAR1), ADARB1 (ADAR2) or ADARB2 (ADAR3) (see, e.g., Savva et al. Genon. Biol. 2012, 13(12):252).

[0511] In some embodiments, the gene editing system comprises AID/APOBEC (apolipoprotein B editing complex) family of enzymes deaminates cytidine to uridine, leading to mutations in RNA and DNA.

[0512] In some embodiments, the nucleobase editing system comprises ADAR and an antisense oligonucleotide. In certain embodiments, the antisense oligonucleotide is chemically optimized antisense oligonucleotide. In certain embodiments, the antisense oligonucleotide is administered for the nucleobase editing, wherein the antisense oligonucleotide activates human endogenous ADAR for nucleobase editing. Such ADAR and antisense oligonucleotide editing system provides a safer site-directed RNA editing with low off-target effect. See, e.g., Merkle et al., Nature Biotechnology, 2019, 37, 133-138.

[0513] Any of the above base editor embodiments or variants, modifications, or derivatives thereof are contemplated herein to be delivered by the LNP systems disclosed in this specification for gene editing in cells, tissues, and/or organs under in vitro, ex vivo, or in vivo conditions. The various components described herein may be configured and delivered in any suitable manner. Any of the descriptions presented in this section are not intended to be strictly limiting.

### Cas12a (Cas Type V) Prime Editor Format

[0514] In other embodiments, the Cas12a-based gene editing system is combined with one or more reverse transcriptases to produce a prime editor when used in connection with a specialized guide RNA called a prime editing guide RNA (“pegRNA”). In some embodiments, the reverse transcriptase is fused, optionally via a linker, to a component of the Cas12a-based gene editing system. For example, the reverse transcriptase might be coupled or fused to a Cas12a domain via a linker.

[0515] Prime editing technology is a gene editing technology that can make targeted insertions, deletions, and all transversion and transition point mutations in a target genome. Without wishing to be bound by any particular theory, the prime editing process may search and replace endogenous sequences in a target polynucleotide. The spacer sequence of a prime editing guide RNA (“PEgRNA” or “pegRNA”) recognizes and anneals with a search target sequence in a target strand of a double stranded target polynucleotide, e.g., a double stranded target DNA. A prime editing complex may generate a nick in the target DNA on the edit strand which is the complementary strand of the target strand. The prime editing complex may then use a free 3′ end formed at the nick site of the edit strand to initiate DNA synthesis, where a “primer binding site sequence” (PBS) of the PEgRNA complexes with the free 3′ end, and a single stranded DNA is synthesized (by reverse transcriptase) using an editing template of the PEgRNA as a template. As used herein, a “primer binding site” is a single-stranded portion of the PEgRNA that comprises a region of complementarity to the PAM strand (i.e., the non-target strand or the edit strand). The PBS is complementary or substantially complementary to a sequence on the PAM strand of the double stranded target DNA that is immediately upstream of the nick site.

[0516] The term “prime editor (PE)” refers to the polypeptide or polypeptide components involved in prime editing, or any polynucleotide(s) encoding the polypeptide or polypeptide components. In various embodiments, a prime editor includes a polypeptide domain having DNA binding activity and a polypeptide domain having DNA polymerase activity. In some embodiments, the prime editor further comprises a polypeptide domain having nuclease activity. In some embodiments, the polypeptide domain having DNA binding activity comprises a nuclease domain or nuclease activity. In some embodiments, the polypeptide domain having nuclease activity comprises a nickase, or a fully active nuclease. As used herein, the term “nickase” refers to a nuclease capable of cleaving only one strand of a double-stranded DNA target. In some embodiments, the prime editor comprises a polypeptide domain that is an inactive nuclease. In some embodiments, the polypeptide domain having programmable DNA binding activity comprises a nucleic acid guided DNA binding domain, for example, a CRISPR-Cas protein, for example, a Cas9 nickase, a Cpfl nickase, or another CRISPR-Cas nuclease. In some embodiments, the polypeptide domain having DNA polymerase activity comprises a template-dependent DNA polymerase, for example, a DNA-dependent DNA polymerase or an RNA-dependent DNA polymerase. In some embodiments, the DNA polymerase is a reverse transcriptase. In some embodiments, the prime editor comprises additional polypeptides involved in prime editing, for example, a polypeptide domain having 5′ endonuclease activity, e.g., a 5′ endogenous DNA flap endonucleases (e.g., FEN1), for helping to drive the prime editing process towards the edited product formation. In some embodiments, the prime editor further comprises an RNA-protein recruitment polypeptide, for example, a MS2 coat protein.

[0517] A prime editor may be engineered. In some embodiments, the polypeptide components of a prime editor do not naturally occur in the same organism or cellular environment. In some embodiments, the polypeptide components of a prime editor may be of different origins or from different organisms. In some embodiments, a prime editor comprises a DNA binding domain and a DNA polymerase domain that are derived from different species. In some embodiments, a prime editor comprises a Cas polypeptide (DNA binding domain) and a reverse transcriptase polypeptide (DNA polymerase) that are derived from different species. For example, a prime editor may comprise a S. pyogenes Cas9 polypeptide and a Moloney murine leukemia virus (M-MLV) reverse transcriptase polypeptide.

[0518] In some embodiments, polypeptide domains of a prime editor may be fused or linked by a peptide linker to form a fusion protein. In other embodiments, a prime editor comprises one or more polypeptide domains provided in trans as separate proteins, which are capable of being associated to each other through non-peptide linkages or through aptamers or recruitment sequences. For example, a prime editor may comprise a DNA binding domain and a reverse transcriptase domain associated with each other by an RNA-protein recruitment aptamer, e.g., a MS2 aptamer, which may be linked to a PEgRNA. Prime editor polypeptide components may be encoded by one or more polynucleotides in whole or in part. In some embodiments, a single polynucleotide, construct, or vector encodes the prime editor fusion protein. In some embodiments, multiple polynucleotides, constructs, or vectors each encode a polypeptide domain or portion of a domain of a prime editor, or a portion of a prime editor fusion protein. For example, a prime editor fusion protein may comprise an N-terminal portion fused to an intein-N and a C-terminal portion fused to an intein-C, each of which is individually encoded by an AAV vector.

[0519] The editing template may comprise one or more intended nucleotide edits compared to the endogenous double stranded target DNA sequence. Accordingly, the newly synthesized single stranded DNA also comprises the nucleotide edit(s) encoded by the editing template. Through removal of the editing target sequence on the edit strand of the double stranded target DNA and DNA repair mechanism, the newly synthesized single stranded DNA replaces the editing target sequence, and the desired nucleotide edit(s) are incorporated into the double stranded target DNA.

[0520] Prime editing was first described in Anzalone et al., “Search-and-replace genome editing without double-strand breaks or donor DNA,” Nature, December 2019, 576 (7789): pp. 149-157, which is incorporated herein in its entirety. Prime editing has subsequently been described and detailed in numerous follow-on publications, including, for example, (i) Liu et al., “Prime editing: a search and replace tool with versatile base changes,” Yi Chuan, Nov. 20, 2022, 44(11): 993-1008; (ii) Lu C et al., “Prime Editing: An All-Rounder for Genome Editing. Int J Mol Sci. 2022 Aug. 30; 23(17):9862; (iii) Velimirovic M, Zanetti L C, Shen M W, Fife J D, Lin L, Cha M, Akinci E, Barnum D, Yu T, Sherwood R I. Peptide fusion improves prime editing efficiency. Nat Commun. 2022 Jun. 18; 13(1):3512. doi: 10.1038/s41467-022-31270-y. PMID: 35717416; PMCID: PMC9206660; (iv) Velimirovic M, Zanetti L C, Shen M W, Fife J D, Lin L, Cha M, Akinci E, Barnum D, Yu T, Sherwood R I. Peptide fusion improves prime editing efficiency. Nat Commun. 2022 Jun. 18; 13(1):3512. doi: 10.1038/s41467-022-31270-y. PMID: 35717416; PMCID: PMC9206660; (v) Habib 0, Habib G, Hwang G H, Bae S. Comprehensive analysis of prime editing outcomes in human embryonic stem cells. Nucleic Acids Res. 2022 Jan. 25; 50(2):1187-1197. doi: PMID: 35018468; PMCID: PMC8789035; (vi) Marzec M, Braszewska-Zalewska A, Hensel G. Prime Editing: A New Way for Genome Editing. Trends Cell Biol. 2020 April; 30(4):257-259. doi: 10.1016/j.tcb.2020.01.004. Epub 2020 Jan. 27. PMID: 32001098; (vii) Tao R, Wang Y, Jiao Y, Hu Y, Li L, Jiang L, Zhou L, Qu J, Chen Q, Yao S. Bi-PE: bi-directional priming improves CRISPR/Cas9 prime editing in mammalian cells. Nucleic Acids Res. 2022 Jun. 24; 50(11):6423-6434. doi: 10.1093/nar/gkac506. PMID: 35687127; PMCID: PMC9226529; (viii) Nelson J W, Randolph P B, Shen S P, Everette K A, Chen P J, Anzalone A V, An M, Newby G A, Chen J C, Hsu A, Liu D R. Engineered pegRNAs improve prime editing efficiency. Nat Biotechnol. 2022 March; 40(3):402-410. doi: 10.1038/s41587-021-01039-7. Epub 2021 Oct. 4. Erratum in: Nat Biotechnol. 2021 Dec. 8; PMID: 34608327; PMCID: PMC8930418; (ix) Doman J L, Sousa A A, Randolph P B, Chen P J, Liu D R. Designing and executing prime editing experiments in mammalian cells. Nat Protoc. 2022 November; 17(11):2431-2468. doi: 10.1038/s41596-022-00724-4. Epub 2022 Aug. 8. PMID: 35941224; PMCID: PMC9799714; (x) Jiao Y, Zhou L, Tao R, Wang Y, Hu Y, Jiang L, Li L, Yao S. Random-PE: an efficient integration of random sequences into mammalian genome by prime editing. Mol Biomed. 2021 Nov. 18; 2(1):36. doi: 10.1186/s43556-021-00057-w. PMID: 35006470; PMCID: PMC8607425; and (xi) Awan M J A, Ali Z, Amin I, Mansoor S. Twin prime editor: seamless repair without damage. Trends Biotechnol. 2022 April; 40(4):374-376. doi: 10.1016/j.tibtech.2022.01.013. Epub 2022 Feb. 10. PMID: 35153078, all of which are incorporated herein by reference.

[0521] In addition, prime editing has been described and disclosed in numerous published patent applications, each of which their entire contents, amino acid sequences, nucleotide sequences, and all disclosures therein are incorporated herein by reference in their entireties:

| Publication No. | Publication Date | Title |
|---|---|---|
| WO 2023/015309 A2 | Feb. 9, 2023 | IMPROVED PRIME EDITORS AND METHODS |
| | | USE |
| WO 2023/004439 A2 | Jan. 26, 2023 | GENOME EDITING COMPOSITIONS AND |
| | | METHODS FOR TREATMENT OF CHRONIC |
| | | GRANULOMATOUS DISEASE |
| WO 2023/288332 A2 | Jan. 19, 2023 | GENOME EDITING COMPOSITIONS AND |
| | | METHODS FOR TREATMENT OF WILSON'S |
| | | DISEASE |
| WO 2023/283092 A1 | Jan. 12, 2023 | COMPOSITIONS AND METHODS FOR |
| | | EFFICIENT GENOME EDITING |
| WO 2023/283246 A1 | Jan. 12, 2023 | MODULAR PRIME EDITOR SYSTEMS FOR |
| | | GENOME ENGINEERING |
| WO 2022/256714 A3 | Jan. 12, 2023 | GENOME EDITING COMPOSITIONS AND |
| | | METHODS FOR TREATMENT OF WILSON'S |
| | | DISEASE |
| EP 4107273 Al | Dec. 28, 2022 | PRIME EDITING TECHNOLOGY FOR PLANT |
| | | GENOME ENGINEERING |
| WO 2022/256714 A2 | Dec. 8, 2022 | GENOME EDITING COMPOSITIONS AND |
| | | METHODS FOR TREATMENT OF WILSON'S |
| | | DISEASE |
| WO 2022/234051 A1 | Nov. 10, 2022 | SPLIT PRIME EDITING ENZYME |
| US 2022/0356469 A1 | Nov. 10, 2022 | METHODS AND COMPOSITIONS FOR EDITING |
| | | NUCLEOTIDE SEQUENCES METHODS AND |
| | | COMPOSITIONS FOR EDITING NUCLEOTIDE |
| | | SEQUENCES |
| WO 2022/206352 A1 | Oct. 6, 2022 | PRIME EDITING TOOL, FUSION RNA, AND USE |
| | | THEREOF |
| WO 2022/212926 A1 | Oct. 6, 2022 | METHODS AND COMPOSITIONS FOR EDITING |
| | | NUCLEOTIDE SEQUENCES |
| WO 2022/204476 A1 | Sep. 29, 2022 | NUCLEOTIDE EDITING TO REFRAME DMD |
| | | TRANSCRIPTS BY BASE EDITING AND PRIME |
| | | EDITING |
| WO 2022/203905 A1 | Sep. 29, 2022 | PRIME EDITING-BASED SIMULTANEOUS |
| | | GENOMIC DELETION AND INSERTION |
| U.S. Pat. No. 11,447,770 B1 | Sep. 20, 2022 | Methods and compositions for prime editing |
| | | nucleotide sequences |
| WO 2022/174829 A1 | Aug. 25, 2022 | EDITING OF DOUBLE-STRANDED DNA WITH |
| | | RELAXED PAM REQUIREMENT FIELD OF THE |
| | | DISCLOSURE |
| WO 2022/170058 A1 | Aug. 11, 2022 | PRIME EDITOR SYSTEM FOR IN VIVO GENOME |
| | | EDITING |
| WO 2022/169235 A1 | Aug. 11, 2022 | PRIME EDITING COMPOSITION WITH |
| | | IMPROVED EDITING EFFICIENCY |
| WO 2022/150790 A3 | Aug. 11, 2022 | PRIME EDITOR VARIANTS, CONSTRUCTS, AND |
| | | METHODS FOR ENHANCING PRIME EDITING |
| | | EFFICIENCY AND PRECISION |
| WO 2022/149166 A1 | Jul. 14, 2022 | A COCKTAIL FORMULATION FOR SELECTIVE |
| | | ENRICHMENT OF GENE-MODIFIED CELLS |
| WO 2022/150790 A2 | Jul. 14, 2022 | PRIME EDITOR VARIANTS, CONSTRUCTS, AND |
| | | METHODS FOR ENHANCING PRIME EDITING |
| | | EFFICIENCY AND PRECISION |
| U.S. Pat. No. 11,384,353 B2 | Jul. 12, 2022 | Inhibition of unintended mutations in gene editing |
| WO 2022/067130 A3 | Jun. 23, 2022 | PRIME EDITING GUIDE RNAS, COMPOSITIONS |
| | | THEREOF, AND METHODS OF USING THE |
| | | SAME |
| WO 2022/114815 A1 | Jun. 2, 2022 | COMPOSITION FOR PRIME EDITING |
| | | COMPRISING TRANS-SPLICING ADENO- |
| | | ASSOCIATED VIRUS VECTOR |
| WO 2022/100662 A1 | May 19, 2022 | GENOMIC EDITING OF IMPROVED |
| | | EFFICIENCY AND ACCURACY |
| WO 2022/098765 A1 | May 12, 2022 | SPLIT PRIME EDITING PLATFORMS |
| WO 2022/098885 A1 | May 12, 2022 | PRECISE GENOME DELETION AND |
| | | REPLACEMENT METHOD BASED ON PRIME |
| | | EDITING |
| WO 2022/071745 Al | Apr. 7, 2022 | PRIME EDITING USING HIV REVERSE |
| | | TRANSCRIPTASE AND CAS9 OR VARIANT |
| | | THEREOF |
| WO 2022/067130 A2 | Mar. 31, 2022 | PRIME EDITING GUIDE RNAS, COMPOSITIONS |
| | | THEREOF, AND METHODS OF USING THE |
| | | SAME |
| WO 2022/065689 A1 | Mar. 31, 2022 | PRIME EDITING-BASED GENE EDITING |
| | | COMPOSITION WITH ENHANCED EDITING |
| | | EFFICIENCY AND USE THEREOF |
| US 2022/0064626 A1 | Mar. 3, 2022 | INHIBITION OF UNINTENDED MUTATIONS IN |
| | | GENE EDITING |
| WO 2022/032085 Al | Feb. 10, 2022 | TARGETED SEQUENCE INSERTION |
| | | COMPOSITIONS AND METHODS |
| WO 2022/025623 A1 | Feb. 3, 2022 | SYSTEM AND METHOD FOR PRIME EDITING |
| | | EFFICIENCY PREDICTION USING DEEP |
| | | LEARNING |
| WO 2021/226558 A8 | Jan. 13, 2022 | METHODS AND COMPOSITIONS FOR |
| | | SIMULTANEOUS EDITING OF BOTH STRANDS |
| | | OF A TARGET DOUBLE-STRANDED |
| | | NUCLEOTIDE SEQUENCE |
| WO 2021/243289 A1 | Dec. 2, 2021 | SYSTEMS AND METHODS FOR STABLE AND |
| | | HERITABLE ALTERATION BY PRECISION |
| | | EDITING (SHAPE) |
| WO 2021/226558 A1 | Nov. 11, 2021 | METHODS AND COMPOSITIONS FOR |
| | | SIMULTANEOUS EDITING OF BOTH STRANDS |
| | | OF A TARGET DOUBLE-STRANDED |
| | | NUCLEOTIDE SEQUENCE |
| WO 2021/215897 A1 | Oct. 28, 2021 | GENOME EDITION USING CAS9 OR CAS9 |
| | | VARIANT |
| WO 2021/215827 Al | Oct. 28, 2021 | GENOME EDITING USING CAS9 OR CAS9 |
| | | VARIANT |
| WO 2020/191248 A8 | Oct. 21, 2021 | METHODS AND COMPOSITIONS FOR EDITING |
| | | NUCLEOTIDE SEQUENCES |
| WO 2020/191234 A8 | Oct. 21, 2021 | METHODS AND COMPOSITIONS FOR EDITING |
| | | NUCLEOTIDE SEQUENCES |
| WO 2021/165508 A1 | Aug. 26, 2021 | PRIME EDITING TECHNOLOGY FOR PLANT |
| | | GENOME ENGINEERING |
| WO 2021/138469 A1 | Jul. 8, 2021 | GENOME EDITING USING REVERSE |
| | | TRANSCRIPTASE ENABLED AND FULLY ACTIVE |
| | | CRISPR COMPLEXES |
| WO 2021/092204 A1 | May 14, 2021 | METHODS AND COMPOSITIONS FOR NUCLEIC |
| | | ACID-GUIDED NUCLEASE CELL TARGETING |
| | | SCREEN |
| WO 2021/076876 A1 | Apr. 22, 2021 | GENOTYPING EDITED MICROBIAL STRAINS |
| WO 2021/072328 A1 | Apr. 15, 2021 | METHODS AND COMPOSITIONS FOR PRIME |
| | | EDITING RNA |
| WO 2020/191153 A8 | Dec. 30, 2020 | METHODS AND COMPOSITIONS FOR EDITING |
| | | NUCLEOTIDE SEQUENCES |
| WO 2020/191153 A3 | Dec. 10, 2020 | METHODS AND COMPOSITIONS FOR EDITING |
| | | NUCLEOTIDE SEQUENCES |
| WO 2020/191153 A9 | Nov. 12, 2020 | METHODS AND COMPOSITIONS FOR EDITING |
| | | NUCLEOTIDE SEQUENCES |
| WO 2020/191171 A9 | Oct. 29, 2020 | METHODS AND COMPOSITIONS FOR EDITING |
| | | NUCLEOTIDE SEQUENCES |
| WO 2020/191248 A1 | Sep. 24, 2020 | METHOD AND COMPOSITIONS FOR EDITING |
| | | NUCLEOTIDE SEQUENCES |
| WO 2020/191239 A1 | Sep. 24, 2020 | METHODS AND COMPOSITIONS FOR EDITING |
| | | NUCLEOTIDE SEQUENCES |
| WO 2020/191153 A2 | Sep. 24, 2020 | METHODS AND COMPOSITIONS FOR EDITING |
| | | NUCLEOTIDE SEQUENCES |
| WO 2020/191246 A1 | Sep. 24, 2020 | METHODS AND COMPOSITIONS FOR EDITING |
| | | NUCLEOTIDE SEQUENCES |
| WO 2020/191249 A1 | Sep. 24, 2020 | METHODS AND COMPOSITIONS FOR EDITING |
| | | NUCLEOTIDE SEQUENCES |
| WO 2020/191233 A1 | Sep. 24, 2020 | METHODS AND COMPOSITIONS FOR EDITING |
| | | NUCLEOTIDE SEQUENCES |
| WO 2020/191243 A1 | Sep. 24, 2020 | METHODS AND COMPOSITIONS FOR EDITING |
| | | NUCLEOTIDE SEQUENCES |
| WO 2020/191234 A1 | Sep. 24, 2020 | METHODS AND COMPOSITIONS FOR EDITING |
| | | NUCLEOTIDE SEQUENCES |
| WO 2020/191245 A1 | Sep. 24, 2020 | METHODS AND COMPOSITIONS FOR EDITING |
| | | NUCLEOTIDE SEQUENCES |
| WO 2020/191242 A1 | Sep. 24, 2020 | METHODS AND COMPOSITIONS FOR EDITING |
| | | NUCLEOTIDE SEQUENCES |
| WO 2020/191171 Al | Sep. 24, 2020 | METHODS AND COMPOSITIONS FOR EDITING |
| | | NUCLEOTIDE SEQUENCES |
| WO 2020/191241 A1 | Sep. 24, 2020 | METHODS AND COMPOSITIONS FOR EDITING |
| | | NUCLEOTIDE SEQUENCES |
| WO 2020/156575 A1 | Aug. 6, 2020 | INHIBITION OF UNINTENDED MUTATIONS IN |
| | | GENE EDITING |
| U.S. Pat. No. 10,189,831 B2 | Jan. 29, 2019 | Non-nucleoside reverse transcriptase inhibitors |
| WO 2019/014564 A1 | Jan. 17, 2019 | SYSTEMS AND METHODS FOR TARGETED |
| | | INTEGRATION AND GENOME EDITING AND |
| | | DETECTION THEREOF USING INTEGRATED |
| | | PRIMING SITES |
| U.S. Pat. No. 10,150,955 B2 | Dec. 11, 2018 | Stabilized reverse transcriptase fusion proteins |
| WO 2018/049168 A1 | Mar. 15, 2018 | HIGH-THROUGHPUT PRECISION GENOME |
| | | EDITING |
| U.S. Pat. No. 9,783,791 B2 | Oct. 10, 2017 | Mutant reverse transcriptase and methods of use |
| U.S. Pat. No. 9,458,484 B2 | Oct. 4, 2016 | Reverse transcriptase mixtures with improved |
| | | storage stability |

[0522] In some embodiments, the Cas12 based gene editing system is a prime editing system comprising a Cas12a domain (e.g., a nickase Cas12a domain) fused to a reverse transcriptase or a polynucleotide encoding such a prime editing system.

[0523] Prime editing is a versatile and precise genome editing method that directly writes new genetic information into a specified DNA site using a catalytically impaired Cas fused to an engineered reverse transcriptase, also referred to as a prime editor, which is programmable using a prime editing guide RNA (“pegRNA”) that both specifies the target site and encodes the desired edit (see, e.g., Anzalone et al., Nature 2019). Prime editing bypasses the need for DNA donor templates by using a prime editor having nickase or catalytically impaired enzymatic activity.

[0524] A prime editing system comprises a prime editor. The prime editor (“PE”) comprises a catalytically impaired Cas protein (e.g., a Cas12a) fused to an engineered reverse transcriptase which can precisely and permanently edit one or more target nucleobases in a target polynucleotide.

[0525] In some embodiments, the prime editor comprises an engineered Moloney murine leukemia virus (“M-MLV”) reverse transcriptase (“RT”) fused to a Cas-H840A nickase (called “PE2”). In some embodiments, the prime editor comprises an engineered M-MLV RT fused to a Cas9-H840A nickase. In some embodiments, the prime editor comprises an engineered M-MLV RT fused to a Streptococcus pyogenes Cas9 (spCas9)-H840A nickase. PE modifications include increased PAM flexibility to increase the utility of PE2 editing, expanding the coverage of targetable pathogenic variants in the ClinVar database that can now be prime edited to 94.4%.

[0526] In some embodiments, the prime editing system further comprises a prime editing guide RNA (“pegRNA”). In some embodiments, the cargo comprises a pegRNA or a polynucleotide encoding a pegRNA.

[0527] In some embodiments, the prime editing system further comprises a second guide RNA targeting the complementary strand, allowing the Cas9 nickase to also nick the non-edited strand (called “PE3”), which biases mismatch DNA repair in favor of the edited sequence. In some embodiments, the second guide RNA is designed to recognize the complementary strand of DNA only after the PE3 edit has occurred (called “PE3b”), which reduces indel formation.

[0528] In some embodiments, the prime editing system comprises an uracil glycosylase inhibitor. In some embodiments, the prime editing system comprises a Cas9 protein fused to an uracil glycosylase inhibitor. In some embodiments, the cargo comprises an uracil glycosylase inhibitor or a polynucleotide encoding an uracil glycosylase inhibitor. In some embodiments, the cargo comprises a Cas9 protein fused to an uracil glycosylase inhibitor or a polynucleotide encoding a Cas9 protein fused to an uracil glycosylase inhibitor.

[0529] Any of the above prime editor embodiments or variants, modifications, or derivatives thereof are contemplated herein to be delivered by the LNP systems disclosed in this specification for gene editing in cells, tissues, and/or organs under in vitro, ex vivo, or in vivo conditions. The various components described herein may be configured and delivered in any suitable manner. Any of the descriptions presented in this section are not intended to be strictly limiting.

### Cas12a (Cas Type V) Retron Editor Format

[0530] In still other embodiments, the herein disclosed Cas12a gene editing system may comprise an engineered retron system. An engineered retron editing system in various embodiments may comprise (a) a retron reverse transcriptase, or a nucleic acid molecule encoding a retron reverse transcriptase, (b) a retron ncRNA (or a nucleic acid molecule encoding same) comprising a modified msd region to include a sequence that is reverse transcribed to form a single strand template DNA sequence (RT-DNA), (c) a Cas12a domain, and (d) a guide RNA to target the nuclease to a desired target site.

[0531] Retrons are defined by their unique ability to produce an unusual satellite DNA known as msDNA (multicopy single-stranded DNA). DNA encoding retrons includes a reverse trancriptase (RT)-coding gene (ret) and a nucleic acid sequence encoding the non-coding RNA (ncRNA), which contains two contiguous and inverted non-coding sequences referred to as the msr and msd. The ret gene and the non-coding RNA (including the msr and msd) are transcribed as a single RNA transcript, which becomes folded into a specific secondary structure following post-transcriptional processing. Once translated, the RT binds the RNA template downstream from the msd locus, initiating reverse transcription of the RNA towards its 5′ end, assisted by the 2′OH group present in a conserved branching guanosine residue that acts as a primer. Reverse transcription halts before reaching the msr locus, and the resulting DNA, the msDNA, remains covalently attached to the RNA template via a 2′-5′ phosphodiester bond and base-pairing between the 3′ ends of the msDNA and the RNA template. The external regions, at the 5′ and 3′ ends of the msd/msr transcript (a1 and a2, respectively) are complementary and can hybridize, leaving the structures located in the msr and msd regions in internal positions. The msr locus, which is not reverse transcribed, forms one to three short stem-loops of variable size, ranging from 3 to 10 base pairs, whereas the msd locus folds into a single/double long hairpin with a highly variable long stem of 10-50 bp in length that is also present in the final msDNA form.

[0532] It has recently been reported that retrons may be utilized as a means to provide donor DNA template for HDR-dependent genome editing (e.g., see Lopez et al., “Precise genome editing across kingdoms of life using retron-derived DNA,” Nature Chemical Biology, Dec. 12, 2021, 18, pages 199-206 (2022)), however, producing sufficient levels of donor DNA template intracellularly to sufficiently support efficient HDR-dependent editing remains a significant challenge.

[0533] Retrons have previously been described in the scientific literature, including in the context of retron editing. For example, retrons have been described in the following references, each of which are incorporated herein by reference:

| | Date | | | | | |
|---|---|---|---|---|---|---|
| Title | Published | Journal Name | Author/s | Vol. | Start | End |
| Recording gene | Jul. 27, 2022 | Nature | Santi Bhattarai- | 608 | 217 | 225 |
| expression order | | | Kline; Sierra K Lear; | | | |
| in DNA by | | | Chloe B Fishman; | | | |
| CRISPR addition | | | Santiago C Lopez; | | | |
| of retron | | | Elana R Lockshin; | | | |
| barcodes. | | | Max G Schubert; | | | |
| | | | Jeff Nivala; George | | | |
| | | | M Church; Seth L | | | |
| | | | Shipman | | | |
| Retrons Display | Jun. 1, 2021 | Genetic | | 41 | 15 | 15 |
| Genome Editing | | Engineering & | | | | |
| Strengths Even | | Biotechnology | | | | |
| CRISPR Might | | News | | | | |
| Envy | | | | | | |
| Retron reverse | Mar. 16, 2022 | Nucleic acids | Christina Palka; | 50 | 3490 | 3504 |
| transcriptase | | research | Chloe B Fishman; | | | |
| termination and | | | Santi Bhattarai- | | | |
| phage defense | | | Kline; Samuel A | | | |
| are dependent on | | | Myers; Seth L | | | |
| host RNase H1. | | | Shipman | | | |
| Retrons: | Aug. 1, 2020 | The CRISPR | Karen L. Maxwell | 3 | 226 | 227 |
| Complementing | | journal | | | | |
| CRISPR in | | | | | | |
| Phage Defense. | | | | | | |
| Systematic | Dec. 4, 2020 | Nucleic acids | Mario Rodríguez | 48 | 12632 | 12647 |
| prediction of | | research | Mestre; Alejandro | | | |
| genes | | | González-Delgado; | | | |
| functionally | | | Luis I. Gutierrez- | | | |
| associated with | | | Rus; Francisco | | | |
| bacterial retrons | | | Martínez-Abarca; | | | |
| and classification | | | Nicolás Toro | | | |
| of the encoded | | | | | | |
| tripartite | | | | | | |
| systems. | | | | | | |
| Precise genome | Aug. 17, 2021 | Protein & cell | Xiangfeng Kong; | 12 | 899 | 902 |
| editing without | | | Zikang Wang; | | | |
| exogenous donor | | | Renxia Zhang; Xing | | | |
| DNA via retron | | | Wang; Yingsi Zhou; | | | |
| editing system in | | | Linyu Shi; Hui Yang | | | |
| human cells. | | | | | | |
| Precise genome | Dec. 23, 2021 | Nature chemical | Santiago C Lopez; | 18 | 199 | 206 |
| editing across | | biology | Kate D Crawford; | | | |
| kingdoms of life | | | Sierra K Lear; Santi | | | |
| using retron- | | | Bhattarai-Kline; Seth | | | |
| derived DNA. | | | L Shipman | | | |
| Prokaryotic | May 13, 2021 | FEMS | Alejandro González- | 45 | | |
| reverse | | microbiology | Delgado; Mario | | | |
| transcriptases: | | reviews | Rodríguez Mestre; | | | |
| from | | | Francisco Martínez- | | | |
| retroelements to | | | Abarca; Nicolás | | | |
| specialized | | | Toro | | | |
| defense systems | | | | | | |
| A function for | Nov. 17, 2020 | Nature reviews. | Grant Otto | 19 | 3 | 3 |
| retrons. | | Microbiology | | | | |
| Retrons and their | Oct. 10, 2019 | Nucleic acids | Anna J. Simon; | 47 | 11007 | 11019 |
| applications in | | research | Andrew D. | | | |
| genome | | | Ellington; Ilya J. | | | |
| engineering. | | | Finkelstein | | | |
| High-efficiency | Jan. 1, 2022 | Synthetic | Wenjun Jiang; | 7 | ysac025 | |
| retron-mediated | | biology | Gundra Sivakrishna | | | |
| single-stranded | | (Oxford, | Rao; Rashid Aman; | | | |
| DNA production | | England) | Haroon Butt; Radwa | | | |
| in plants. | | | Kamel; Khalid | | | |
| | | | Sedeek; Magdy M | | | |
| | | | Mahfouz | | | |
| Bacterial retrons | Jan. 24, 2022 | The CRISPR | Zhao B; Chen Sa; | 5 | 31 | 39 |
| enable precise | | journal | Lee J; Hunter B. | | | |
| gene editing in | | | Fraser | | | |
| human cells | | | | | | |
| Like CRISPR, | Nov. 20, 2020 | Science (New | Elizabeth Pennisi | 370 | 898 | 899 |
| mystery gene | | York, N.Y.) | | | | |
| editor began as a | | | | | | |
| virus fighter. | | | | | | |
| Bacterial Retrons | Nov. 5, 2020 | Cell | Adi Millman; Aude | 183 | 1551 | 1561 |
| Function In Anti- | | | Bernheim; Avigail | | | |
| Phage Defense. | | | Stokar-Avihail; Taya | | | |
| | | | Fedorenko; Maya | | | |
| | | | Voichek; Azita | | | |
| | | | Leavitt; Yaara | | | |
| | | | Oppenheimer- | | | |
| | | | Shaanan; Rotem | | | |
| | | | Sorek | | | |
| Multiplex | May 4, 2020 | ACS synthetic | Hyeonseob Lim; | 9 | 1003 | 1009 |
| generation, | | biology | Soyeong Jun; | | | |
| tracking, and | | | Minjeong Park; | | | |
| functional | | | Junghak Lim; | | | |
| screening of | | | Jaehwan Jeong; Ji | | | |
| substitution | | | Hyun Lee; Duhee | | | |
| mutants using a | | | Bang | | | |
| crispr/retron | | | | | | |
| system | | | | | | |
| Multiple origins | Jul. 11, 2019 | RNA biology | Nicolás Toro; | 16 | 1486 | 1493 |
| of reverse | | | Francisco Martínez- | | | |
| transcriptases | | | Abarca; Mario | | | |
| linked to | | | Rodríguez Mestre; | | | |
| CRISPR-Cas | | | Alejandro González- | | | |
| systems. | | | Delgado | | | |
| Retroelement- | Oct. 26, 2018 | ACS synthetic | Anna J. Simon; | 7 | 2600 | 2611 |
| Based Genome | | biology | Barrett R. Morrow; | | | |
| Editing and | | | Andrew D. Ellington | | | |
| Evolution. | | | | | | |

[0534] In addition, retrons have previously been described in the patent literature, including in the context of retron editing. For example, retrons have been described in the following references, each of which are incorporated herein by reference:

| Publication No. | TITLE |
|---|---|
| US 2020/0115706 A1 | METHOD OF RECORDING MULTIPLEXED |
| | BIOLOGICAL INFORMATION INTO A |
| | CRISPR ARRAY USING A RETRON |
| EP 3510151 A4 | HIGH-THROUGHPUT PRECISION GENOME |
| | EDITING |
| US 2019/0330619 A1 | HIGH-THROUGHPUT PRECISION GENOME |
| | EDITING |
| EP 3510151 A1 | HIGH-THROUGHPUT PRECISION GENOME |
| | EDITING |
| WO 2018/191525 A1 | METHOD OF RECORDING MULTIPLEXED |
| | BIOLOGICAL INFORMATION INTO A |
| | CRISPR ARRAY USING A RETRON |
| US 2018/0127759 A1 | DYNAMIC GENOME ENGINEERING |
| WO 2018/049168 A1 | HIGH-THROUGHPUT PRECISION GENOME |
| | EDITING |
| US 2017/0204399 A1 | GENOMICALLY-ENCODED MEMORY IN |
| | LIVE CELLS |
| EP 3180430 A1 | GENOMICALLY-ENCODED MEMORY IN |
| | LIVE CELLS |
| CA 2488328 C | RETRONS FOR GENE TARGETING |
| WO 2016/025719 A1 | GENOMICALLY-ENCODED MEMORY IN |
| | LIVE CELLS |
| U.S. Pat. No. | RETRONS FOR GENE TARGETING |
| 8,932,860 B2 | |
| EP 1517992 B1 | RETRONS FOR GENE TARGETING |
| AU 2003/233734 C1 | RETRONS FOR GENE TARGETING |
| AU 2003/233734 B2 | RETRONS FOR GENE TARGETING |
| US 2009/0123991 A1 | RETRONS FOR GENE TARGETING |
| US 2005/0250207 A1 | RETRONS FOR GENE TARGETING |
| EP 1517992 A2 | RETRONS FOR GENE TARGETING |
| WO 2003/104470 A3 | RETRONS FOR GENE TARGETING |
| AU 2003/233734 A1 | RETRONS FOR GENE TARGETING |
| CA 2488328 A1 | RETRONS FOR GENE TARGETING |
| WO 2003/104470 A2 | RETRONS FOR GENE TARGETING |

[0535] In some embodiments, the Cas12a retron editing system can be used for genome editing a desired site. A retron is engineered with a heterologous nucleic acid sequence encoding a donor polynucleotide (“template or donor nucleotide sequence” or “template DNA”) suitable for use with nuclease genome editing system. The nuclease is designed to specifically target a location proximal to the desired edit (the nuclease should be designed such that it will not cut the target once the edit is properly installed). The Cas12a domain is linked to the retron, either by direct fusion to the RT or by fusion of the msDNA to the gRNA (only applicable for RNA-guided nucleases). A heterologous nucleic acid sequence is inserted into the retron msd.

[0536] In some embodiments, the heterologous nucleic acid sequence has 10-100 or more bp of homologous nucleic acid sequence to the genome on both sides of the desired edit. The desired edit (insertion, deletion, or mutation) is in between the homologous sequence.

[0537] In some embodiments, donor polynucleotides comprise a sequence comprising an intended genome edit flanked by a pair of homology arms responsible for targeting the donor polynucleotide to the target locus to be edited in a cell. The donor polynucleotide typically comprises a 5′ homology arm that hybridizes to a 5′ genomic target sequence and a 3′ homology arm that hybridizes to a 3′ genomic target sequence. The homology arms are referred to herein as 5′ and 3′ (i.e., upstream and downstream) homology arms, which relate to the relative position of the homology arms to the nucleotide sequence comprising the intended edit within the donor polynucleotide. The 5′ and 3′ homology arms hybridize to regions within the target locus in the genomic DNA to be modified, which are referred to herein as the “5′ target sequence” and “3′ target sequence,” respectively.

[0538] The homology arm must be sufficiently complementary for hybridization to the target sequence to mediate homologous recombination between the donor polynucleotide and genomic DNA at the target locus. For example, a homology arm may comprise a nucleotide sequence having at least about 80-100% sequence identity to the corresponding genomic target sequence, including any percent identity within this range, such as at least 80%, 81%, 82%, 83%, 84%, 85%, 86%, 87%, 88%, 89%, 90%, 91%, 92%, 93%, 94%, 95%, 96%, 97%, 98%, 99% or 100% sequence identity thereto, wherein the nucleotide sequence comprising the intended edit can be integrated into the genomic DNA by HDR at the genomic target locus recognized (i.e., having sufficient complementary for hybridization) by the 5′ and 3′ homology arms.

[0539] In some embodiments, the corresponding homologous nucleotide sequences in the genomic target sequence (i.e., the “5′ target sequence” and “3′ target sequence”) flank a specific site for cleavage and/or a specific site for introducing the intended edit. The distance between the specific cleavage site and the homologous nucleotide sequences (e.g., each homology arm) can be several hundred nucleotides. In some embodiments, the distance between a homology arm and the cleavage site is 200 nucleotides or less (e.g., 0, 10, 20, 30, 50, 75, 100, 125, 150, 175, and 200 nucleotides). In most cases, a smaller distance may give rise to a higher gene targeting rate. In some embodiments, the donor polynucleotide is substantially identical to the target genomic sequence, across its entire length except for the sequence changes to be introduced to a portion of the genome that encompasses both the specific cleavage site and the portions of the genomic target sequence to be altered.

[0540] A homology arm can be of any length, e.g. 10 nucleotides or more, 15 nucleotides or more, 20 nucleotides or more, 50 nucleotides or more, 100 nucleotides or more, 250 nucleotides or more, 300 nucleotides or more, 350 nucleotides or more, 400 nucleotides or more, 450 nucleotides or more, 500 nucleotides or more, 1000 nucleotides (1 kb) or more, 5000 nucleotides (5 kb) or more, 10000 nucleotides (10 kb) or more, etc. In some instances, the 5′ and 3′ homology arms are substantially equal in length to one another. However, in some instances the 5′ and 3′ homology arms are not necessarily equal in length to one another. For example, one homology arm may be 30% shorter or less than the other homology arm, 20% shorter or less than the other homology arm, 10% shorter or less than the other homology arm, 5% shorter or less than the other homology arm, 2% shorter or less than the other homology arm, or only a few nucleotides less than the other homology arm. In other instances, the 5′ and 3′ homology arms are substantially different in length from one another, e.g. one may be 40% shorter or more, 50% shorter or more, sometimes 60% shorter or more, 70% shorter or more, 80% shorter or more, 90% shorter or more, or 95% shorter or more than the other homology arm.

[0541] The donor polynucleotide may be used in combination with an RNA-guided nuclease, which is targeted to a particular genomic sequence (i.e., genomic target sequence to be modified) by a guide RNA. A target-specific guide RNA comprises a nucleotide sequence that is complementary to a genomic target sequence, and thereby mediates binding of the nuclease-gRNA complex by hybridization at the target site. For example, the gRNA can be designed with a sequence complementary to the sequence of a minor allele to target the nuclease-gRNA complex to the site of a mutation. The mutation may comprise an insertion, a deletion, or a substitution. For example, the mutation may include a single nucleotide variation, gene fusion, translocation, inversion, duplication, frameshift, missense, nonsense, or other mutation associated with a phenotype or disease of interest. The targeted minor allele may be a common genetic variant or a rare genetic variant. In some embodiments, the gRNA is designed to selectively bind to a minor allele with single base-pair discrimination, for example, to allow binding of the nuclease-gRNA complex to a single nucleotide polymorphism (SNP). In particular, the gRNA may be designed to target disease-relevant mutations of interest for the purpose of genome editing to remove the mutation from a gene. Alternatively, the gRNA can be designed with a sequence complementary to the sequence of a major or wild-type allele to target the nuclease-gRNA complex to the allele for the purpose of genome editing to introduces a mutation into a gene in the genomic DNA of the cell, such as an insertion, deletion, or substitution. Such genetically modified cells can be used, for example, to alter phenotype, confer new properties, or produce disease models for drug screening.

[0542] The genomic target site will typically comprise a nucleotide sequence that is complementary to the gRNA and may further comprise a protospacer adjacent motif (PAM). In some embodiments, the target site comprises 20-30 base pairs in addition to a 3 or more base pair PAM. Typically, the first nucleotide of a PAM can be any nucleotide, while the two or more other nucleotides will depend on the specific Cas9 protein that is chosen. Exemplary PAM sequences are known to those of skill in the art and include, without limitation, NNG, NGN, NAG, and NGG, wherein N represents any nucleotide. In some embodiments, the allele targeted by a gRNA comprises a mutation that creates a PAM within the allele, wherein the PAM promotes binding of the Cas9-gRNA complex to the allele.

[0543] In some embodiments, the gRNA is 5-50 nucleotides, 10-30 nucleotides, 15-25 nucleotides, 18-22 nucleotides, or 19-21 nucleotides in length, or any length between the stated ranges, including, for example, 10, 11, 12, 13, 14, 15, 16, 17, 18, 19, 20, 21, 22, 23, 24, 25, 26, 27, 28, 29, 30, 31, 32, 33, 34, or 35 nucleotides in length. The guide RNA may be a single guide RNA comprising crRNA and tracrRNA sequences in a single RNA molecule, or the guide RNA may comprise two RNA molecules with crRNA and tracrRNA sequences residing in separate RNA molecules.

[0544] In some embodiments, the Cas12a is provided in the form of a protein, optionally where the nuclease is complexed with a gRNA to form a ribonucleoprotein (RNP) complex. In some embodiments, the RNA-guided nuclease is provided by a nucleic acid encoding the RNA-guided nuclease, such as an RNA (e.g., messenger RNA) or DNA (expression vector). In some embodiments, the RNA-guided nuclease and the gRNA are both provided by vectors, such as the vectors and the vector system described in other parts of the application (all incorporated herein by reference). Both can be expressed by a single vector or separately on different vectors. The vectors encoding the RNA-guided nuclease and gRNA may be included in the vector system comprising the engineered retron msr gene, msd gene and ret gene sequences. In some embodiments, the RNA-guided nuclease is fused to the RT and/or the msDNA.

[0545] The RNP complex may be administered to a subject or delivered into a cell by methods known in the art, such as those described in U.S. Pat. No. 11,390,884, which is incorporated by reference herein in its entirety. In some embodiments, the endonuclease/gRNA ribonucleoprotein (RNP) complexes are delivered to cells by electroporation. Direct delivery of the RNP complex to a subject or cell eliminates the need for expression from nucleic acids (e.g., transfection of plasmids encoding Cas12a and gRNA). It also eliminates unwanted integration of DNA segments derived from nucleic acid delivery (e.g., transfection of plasmids encoding Cas12a and gRNA). An endonuclease/gRNA ribonucleoprotein (RNP) complex usually is formed prior to administration.

[0546] Codon usage may be optimized to further improve production of an RNA-guided nuclease and/or reverse transcriptase (RT) in a particular cell or organism. For example, a nucleic acid encoding an RNA-guided nuclease or reverse transcriptase can be modified to substitute codons having a higher frequency of usage in a yeast cell, a bacterial cell, a human cell, a non-human cell, a mammalian cell, a rodent cell, a mouse cell, a rat cell, or any other host cell of interest, as compared to the naturally occurring polynucleotide sequence. When a nucleic acid encoding the RNA-guided nuclease or reverse transcriptase is introduced into cells, the protein can be transiently, conditionally, or constitutively expressed in the cell.

[0547] In some embodiments, the engineered retron used for genome editing with nuclease genome editing systems can further include accessory or enhancer proteins for recombination. Examples of recombination enhancers can include nonhomologous end joining (NHEJ) inhibitors (e.g., inhibitor of DNA ligase IV, a KU inhibitor (e.g., KU70 or KU80), a DNA-PKc inhibitor, or an artemis inhibitor) and homologous directed repair (HDR) promoters, or both, that can enhance or improve more precise genome editing and/or the efficiency of homologous recombination. In some embodiments, the recombination accessory or enhancers can comprise C-terminal binding protein interacting protein (CtIP), cyclinB2, Rad family members (e.g. Rad50, Rad51, Rad52, etc).

[0548] CtIP is a transcription factor containing C2H2 zinc fingers that are involved in early steps of homologous recombination. Mammalian CtIP and its orthologs in other eukaryotes promote the resection of DNA double-strand breaks and are essential for meiotic recombination. HDR may be enhanced by using Cas9 nuclease associated (e.g. fused) to an N-terminal domain of CtIP, an approach that forces CtIP to the cleavage site and increases transgene integration by HDR. In some embodiments, an N-terminal fragment of CtIP, called HE for HDR enhancer, may be sufficient for HDR stimulation and requires the CtIP multimerization domain and CDK phosphorylation sites to be active. HDR stimulation by the Cas9-HE fusion depends on the guide RNA used, and therefore the guide RNA will be designed accordingly.

[0549] Using the gene editing system described herein, any target gene or sequence in a host cell can be edited or modified for a desired trait, including but not limited to: Myostatin (e.g., GDF8) to increase muscle growth; Pc POLLED to induce hairlessness; KISS1R to induce bore taint; Dead end protein (dnd) to induce sterility; Nano2 and DDX to induce sterility; CD163 to induce PRRSV resistance; RELA to induce ASFV resilience; CD18 to induce Mannheimia (Pasteurella) haemolytica resilience; NRAMP1 to induce tuberculosis resilience; Negative regulators of muscle mass (e.g., Myostatin) to increase muscle mass.

[0550] Any of the above retron editor embodiments or variants, modifications, or derivatives thereof are contemplated herein to be delivered by the LNP systems disclosed in this specification for gene editing in cells, tissues, and/or organs under in vitro, ex vivo, or in vivo conditions. The various components described herein may be configured and delivered in any suitable manner. Any of the descriptions presented in this section are not intended to be strictly limiting.

### Cas12a (Cas Type V) Integrase Editors (e.g., PASTE)

[0551] In some embodiments, the Cas12a gene editing system comprises one or more integrase domains. In certain embodiments, the Cas12a gene editing system comprises one or more integrases as described and disclosed in PCT Publications WO2022087235A1, WO2020191245A1, WO2022060749A1, WO2021188840A1, WO2021138469A1, US Patent Application Publications US20140349400A1, US20210222164A1 or US20150071898A1, each of which is incorporated by reference herein in their entirety.

### Cas12a (Cas Type V) Epigenetic Editors

[0552] In still other embodiments, the Cas12a gene editing systems may comprise one or more epigenetic functionalities for modulating the epigenome of a cell. Epigenetic editors are generally composed of an epigenetic enzyme or their catalytic domain fused with a user-programmable DNA-binding protein, such as a CRISPR-Cas enzyme or Cas12a disclosed herein. The user-programmable DNA-binding protein (plus a guide RNA for programming the Cas12a) guides the epigenetic enzyme (e.g., a DNA methyltransferase or DNMT) to a specific site (e.g., a CpG island in a promoter region of a gene) in order to induce a change in promoter activity.

[0553] Epigenetic modifications of DNA and histones are known for their multifaceted contributions to transcriptional regulation. As these modifications are faithfully propagated throughout DNA replication, they are considered central players in cellular memory of transcriptional states. Many efforts in the last decade have generated a vast understanding of individual epigenetic modifications and their contribution to transcriptional regulation. Epigenetic editing offers powerful tools to selectively induce epigenetic changes in a genome without altering the sequence of a nucleotide sequence as a means to regulate gene activity. The foundation of epigenetic editing is formed by the ability to generate fusion proteins of epigenetic enzymes or their catalytic domains with programmable DNA-binding platforms such as the clustered regularly interspaced short palindromic repeat (e.g., CRISPR Cas9 or Cas12a) to target these to an endogenous locus of choice. The enzymatic fusion protein then dictates the initial deposited modification while subsequent cross-talk within the local chromatin environment likely influences epigenetic and transcriptional output.

[0554] The following published literature discussing epigenetic editing is incorporated herein by reference each in their entireties.
[0555] Gjaltema R A F, Rots M G. Advances of epigenetic editing. Curr Opin Chem Biol. 2020 August; 57:75-81. doi: 10.1016/j.cbpa.2020.04.020. Epub 2020 Jun. 30. PMID: 32619853. https://www.sciencedirect.com/science/article/pii/S1367593120300636?via%3Dihub
[0556] Kleinstiver B P, Sousa A A, Walton R T, Tak Y E, Hsu J Y, Clement K, Welch M M, Horng J E, Malagon-Lopez J, Scarfò I, Maus M V, Pinello L, Aryee M J, Joung J K. Engineered CRISPR-Cas12a variants with increased activities and improved targeting ranges for gene, epigenetic and base editing. Nat Biotechnol. 2019 March; 37(3):276-282. doi: 10.1038/s41587-018-0011-0. Epub 2019 Feb. 11. Erratum in: Nat Biotechnol. 2020 July; 38(7):901. PMID: 30742127; PMCID: PMC6401248. https://www.ncbi.nlm.nih.gov/pmc/articles/PMC6401248/
[0557] Rots M G, Jeltsch A. Editing the Epigenome: Overview, Open Questions, and Directions of Future Development. Methods Mol Biol. 2018; 1767:3-18. doi: 10.1007/978-1-4939-7774-1_1. PMID: 29524127.
[0558] Liu X S, Jaenisch R. Editing the Epigenome to Tackle Brain Disorders. Trends Neurosci. 2019 December; 42(12):861-870. doi: 10.1016/j.tins.2019.10.003. Epub 2019 Nov. 7. PMID: 31706628.
[0559] Waryah C B, Moses C, Arooj M, Blancafort P. Zinc Fingers, TALEs, and CRISPR Systems: A Comparison of Tools for Epigenome Editing. Methods Mol Biol. 2018; 1767:19-63. doi: 10.1007/978-1-4939-7774-1_2. PMID: 29524128.
[0560] Xu X, Hulshoff M S, Tan X, Zeisberg M, Zeisberg E M. CRISPR/Cas Derivatives as Novel Gene Modulating Tools: Possibilities and In Vivo Applications. Int J Mol Sci. 2020 Apr. 25; 21(9):3038. doi: 10.3390/ijms21093038. PMID: 32344896; PMCID: PMC7246536. https://www.ncbi.nlm.nih.gov/pmc/articles/PMC7246536/

[0561] In addition, the following published patent literature relating to epigenetic editing is incorporated herein by reference each in their entireties.

| Publication | |
|---|---|
| Number | Title |
| WO2023283359A2 | COMPOSITIONS AND METHODS FOR |
| | MODULATING SECRETED FRIZZLED |
| | RECEPTOR PROTEIN 1 (SFRP1) GENE |
| | EXPRESSION |
| WO2022226139A1 | TISSUE-SPECIFIC NUCLEIC ACID DELIVERY |
| | BY MIXED CATIONIC LIPID PARTICLES |
| WO2022132926A1 | TISSUE-SPECIFIC NUCLEIC ACID DELIVERY |
| | BY 1,2-DIOLEOYL-3-TRIMETHYL- |
| | AMMONIUM-PROPANE (DOTAP) LIPID |
| | NANOPARTICLES |
| WO2021183720A1 | COMPOSITIONS AND METHODS FOR |
| | MODULATING FORKHEAD BOX P3 |
| | (FOXP3) GENE EXPRESSION |
| WO2021061815A1 | COMPOSITIONS AND METHODS FOR |
| | MODULATING HEPATOCYTE NUCLEAR |
| | FACTOR 4-ALPHA (HNF4α) GENE |
| | EXPRESSION |
| WO2021061707A1 | COMPOSITIONS AND METHODS FOR |
| | MODULATING APOLIPOPROTEIN B (APOB) |
| | GENE EXPRESSION |
| WO2021061698A1 | METHODS AND COMPOSITIONS FOR |
| | MODULATING FRATAXIN EXPRESSION |
| | AND TREATING FRIEDRICH'S ATAXIA |

### Cas12a (Cas Type V) Gene Writing Editor

[0562] In some embodiments, the gene editing system is a gene writing system that comprises a Cas12a domain. In certain embodiments, the gene editing system is one described and disclosed in US Patent Application Publications US2022039681A1 or US20200109398A1, each of which is incorporated by reference herein in their entirety.

[0563] In certain embodiments, the gene editing system is a system for modifying DNA comprising a polypeptide or a nucleic acid encoding a polypeptide capable of target primed reverse transcription, wherein the polypeptide comprises (a) a reverse transcriptase domain and (b) an endonuclease domain, wherein at least one of (a) or (b) is heterologous; and a template RNA comprising (i) a sequence that binds the polypeptide and (ii) a heterologous object sequence. In certain embodiments, the gene editing system is a system for modifying DNA comprising a polypeptide or a nucleic acid encoding a polypeptide capable of target primed reverse transcription, wherein the polypeptide comprises (a) a target DNA binding domain, (b) a reverse transcriptase domain and (c) an endonuclease domain, wherein at least one of (a), (b) or (c) is heterologous, and a template RNA comprising (i) a sequence that binds the polypeptide and (ii) a heterologous object sequence. In certain embodiments, the polypeptide comprises a sequence of at least 50 amino acids having at least 80% identity to a reverse transcriptase domain of a sequence of a polypeptide listed in TABLE 1, TABLE 2, or TABLE 3 of US Patent Application Publication US20200109398A1, which is incorporated by reference in its entirety, including the aforementioned sequence tables.

[0564] In certain embodiments, the reverse transcriptase domain is from a retrovirus or a retrotransposon, such as a LTR-retrotransposon, or a non-LTR retrotransposon. In certain embodiments, the reverse transcriptase is from a non-LTR retrotransposon, wherein the non-LTR retrotransposon is a RLE-type non-LTR retrotransposon from the R2, NeSL, HERO, R4, or CRE Glade, or an APE-type non-LTR retrotransposon from the R1, or Tx1 Glade. In certain embodiments, the reverse transcriptase domain is from an avian retrotransposase of column 8 of Table 3 of US20200109398A1, or a sequence having at least 70%, identity thereto. In certain embodiments, the reverse transcriptase domain does not comprise an RNA binding domain and the polypeptide comprises an RNA binding domain heterologous to the reverse transcriptase domain, wherein the RNA binding domain is a B-box protein, a MS2 coat protein, a dCas protein, or a UTR binding protein, or a fragment or variant of any of the foregoing.

[0565] In certain embodiments, the endonuclease domain is heterologous to the reverse transcriptase domain, and wherein the endonuclease is a Fok1 nuclease (or a functional fragment thereof), a type-II restriction 1-like endonuclease (RLE-type nuclease), another RLE-type endonuclease, or a Prp8 nuclease. In certain embodiments, the endonuclease domain is heterologous to the reverse transcriptase domain, wherein endonuclease domain contains DNA binding functionality. In certain embodiments, the endonuclease domain is heterologous to the reverse transcriptase domain, and wherein the endonuclease has nickase activity and does not form double stranded breaks.

[0566] In certain embodiments, the polypeptide comprises a DNA binding domain heterologous to the reverse transcriptase domain, and wherein the DNA binding domain is a sequence-guided DNA binding element such as Cas12a. In certain embodiments, the polypeptide comprises a DNA binding domain heterologous to the reverse transcriptase domain, and wherein the DNA binding element is a sequence-guided DNA binding element, further wherein the sequence-guided DNA binding element is Cas9, Cpfl, or other CRISPR-related protein. In certain embodiments, the polypeptide comprises a DNA binding domain heterologous to the reverse transcriptase domain, and wherein the DNA binding domain is a transcription factor.

[0567] In certain embodiments, the sequence-guided DNA binding element has been altered to have no endonuclease activity. In certain embodiments, the sequence-guided DNA binding element replaces the endonuclease element of the polypeptide. In certain embodiments, the editing system is capable of modifying DNA using reverse transcriptase activity, optionally in the absence of homologous recombination activity.

[0568] In certain embodiments, the gene editing system is a system for modifying DNA comprising:
[0569] a) a recombinase polypeptide selected from Rec27 (WP_021170377.1, SEQ ID NO: 1241 of US20220396813A1), Rec35 (WP_134161939.1, SEQ ID NO: 1249 of US20220396813A1), or comprising an amino acid sequence of Table 1 or 2 of US20220396813A1, or an amino acid sequence having at least 70%, 75%, 80%, 85%, 90%, 95%, 96%, 97%, 98%, or 99% identity thereto, or a nucleic acid encoding the recombinase polypeptide; and
[0570] b) a double-stranded insert DNA comprising:
   [0571] (i) a DNA recognition sequence that binds to the recombinase polypeptide of (a), said DNA recognition sequence having a first parapalindromic sequence and a second parapalindromic sequence, wherein each parapalindromic sequence is about 10-30, 12-27, or 10-15 nucleotides, e.g., about 13 nucleotides, and the first and second parapalindromic sequences together comprise the parapalindromic region of a nucleotide sequence of Table 1, or a nucleotide sequence having at least 70%, 75%, 80%, 85%, 90%, 95%, 96%, 97%, 98%, or 99% identity thereto, or having no more than 1, 2, 3, 4, 5, 6, 7, 8 sequence alterations (e.g., substitutions, insertions, or deletions) relative thereto, and said DNA recognition sequence further comprises a core sequence of about 5-10 nucleotides, e.g., about 8 nucleotides, wherein the core sequence is situated between the first and second parapalindromic sequences, and
   [0572] (ii) a heterologous object sequence.

### Cas12a (Cas Type V) Recombinase Editors

[0573] In some embodiments, the Cas12a editing system may also further a recombinase domain, e.g., as a fusion or provided in trans. This domain may be further combined with other domains, such as a reverse transcriptase domain. In certain embodiments, the gene editing system can be based on that described and disclosed in US Patent Application Publications US2022039681A1 or US20200109398A1, each of which is incorporated by reference herein in their entirety, and which may be modified to use a herein disclosed Cas12a domain in place of the programmable nuclease disclosed therein.

[0574] A recombinase refers to a site-specific enzyme that mediates the recombination of DNA between recombinase recognition sequences, which results in the excision, integration, inversion, or exchange (e.g., translocation) of DNA fragments between the recombinase recognition sequences. Recombinases can be classified into two distinct families: serine recombinases (e.g., resolvases and invertases) and tyrosine recombinases (e.g., integrases). Examples of serine recombinases include, without limitation, Hin, Gin, Tn3, b-six, CinH, ParA, gd, Bxbl, jC31, TP901, TG1, fBT1, R4, fRV1, fFC1, MR11, A118, U153, and gp29. Examples of tyrosine recombinases include, without limitation, Cre, FLP, R, Lambda, HK101, HK022, and pSAM2. The serine and tyrosine recombinase names stem from the conserved nucleophilic amino acid residue that the recombinase uses to attack the DNA and which becomes covalently linked to the DNA during strand exchange.

[0575] Recombinases have numerous applications, including the creation of gene knockouts/knock-ins and gene therapy applications. See, e.g., Brown et al., “Serine recombinases as tools for genome engineering.” Methods. 2011; 53(4):372-9; Hirano et al., “Site-specific recombinases as tools for heterologous gene integration.” Appl. Microbiol. Biotechnol. 2011; 92(2):227-39; Chavez and Calos, “Therapeutic applications of the FC31 integrase system.” Curr. Gene Ther. 2011; 11(5):375-81; Turan and Bode, “Site-specific recombinases: from tag-and-target-to tag-and-exchange-based genomic modifications.” FASEB J. 2011; 25(12):4088-107;

[0576] Venken and Bellen, “Genome-wide manipulations of Drosophila melanogaster with transposons, Flp recombinase, and FC31 integrase.” Methods Mol. Biol. 2012; 859:203-28; Murphy, “Phage recombinases and their applications.” Adv. Virus Res. 2012; 83:367-414; Zhang et al., “Conditional gene manipulation: Creating a new biological era.” J. Zhejiang Univ. Sci. B. 2012; 13(7):511-24; Karpenshif and Bernstein, “From yeast to mammals: recent advances in genetic control of homologous recombination.” DNA Repair (Amst). 2012; 1; 11(10):781-8; the entire contents of each are hereby incorporated by reference in their entirety. The recombinases provided herein are not meant to be exclusive examples of recombinases that can be used in embodiments of the invention. The methods and compositions of the invention can be expanded by mining databases for new orthogonal recombinases or designing synthetic recombinases with defined DNA specificities (See, e.g., Groth et al., “Phage integrases: biology and applications.” J. Mol. Biol. 2004; 335, 667-678; Gordley et al., “Synthesis of programmable integrases.” Proc. Natl. Acad. Sci. USA. 2009; 106, 5053-5058; the entire contents of each are hereby incorporated by reference in their entirety). Other examples of recombinases that are useful in the methods and compositions described herein are known to those of skill in the art, and any new recombinase that is discovered or generated is expected to be able to be used in the different embodiments of the invention. In some embodiments, the catalytic domains of a recombinase are fused to a nuclease-inactivated RNA-programmable nuclease (e.g., dCas9, or a fragment thereof), such that the recombinase domain does not comprise a nucleic acid binding domain or is unable to bind to a target nucleic acid (e.g., the recombinase domain is engineered such that it does not have specific DNA binding activity). Recombinases lacking DNA binding activity and methods for engineering such are known, and include those described by Klippel et al., “Isolation and characterisation of unusual gin mutants.” EMBO J. 1988; 7: 3983-3989: Burke et al., “Activating mutations of Tn3 resolvase marking interfaces important in recombination catalysis and its regulation. Mol Microbiol. 2004; 51: 937-948; Olorunniji et al., “Synapsis and catalysis by activated Tn3 resolvase mutants.” Nucleic Acids Res. 2008; 36: 7181-7191; Rowland et al., “Regulatory mutations in Sin recombinase support a structure-based model of the synaptosome.” Mol Microbiol. 2009; 74: 282-298; Akopian et al., “Chimeric recombinases with designed DNA sequence recognition.” Proc Natl Acad Sci USA. 2003; 100: 8688-8691; Gordley et al., “Evolution of programmable zinc finger-recombinases with activity in human cells. J Mol Biol. 2007; 367: 802-813; Gordley et al., “Synthesis of programmable integrases.” Proc Natl Acad Sci USA. 2009; 106: 5053-5058; Arnold et al., “Mutants of Tn3 resolvase which do not require accessory binding sites for recombination activity.” EMBO J. 1999; 18: 1407-1414; Gaj et al., “Structure-guided reprogramming of serine recombinase DNA sequence specificity.” Proc Natl Acad Sci USA. 2011; 108(2):498-503; and Proudfoot et al., “Zinc finger recombinases with adaptable DNA sequence specificity.” PLoS One. 2011; 6(4):e19537; the entire contents of each are hereby incorporated by reference. For example, serine recombinases of the resolvase-invertase group, e.g., Tn3 and gd resolvases and the Hin and Gin invertases, have modular structures with autonomous catalytic and DNA-binding domains (See, e.g., Grindley et al., “Mechanism of site-specific recombination.” Ann Rev Biochem. 2006; 75: 567-605, the entire contents of which are incorporated by reference). The catalytic domains of these recombinases are thus amenable to being recombined with nuclease-inactivated RNA-programmable nucleases (e.g., dCas9, or a fragment thereof) as described herein, e.g., following the isolation of ‘activated’ recombinase mutants which do not require any accessory factors (e.g., DNA binding activities) (See, e.g., Klippel et al., “Isolation and characterisation of unusual gin mutants.” EMBO J. 1988; 7: 3983-3989: Burke et al., “Activating mutations of Tn3 resolvase marking interfaces important in recombination catalysis and its regulation. Mol Microbiol. 2004; 51: 937-948; Olorunniji et al., “Synapsis and catalysis by activated Tn3 resolvase mutants.” Nucleic Acids Res. 2008; 36: 7181-7191; Rowland et al., “Regulatory mutations in Sin recombinase support a structure-based model of the synaptosome.” Mol Microbiol. 2009; 74: 282-298; Akopian et al., “Chimeric recombinases with designed DNA sequence recognition.” Proc Natl Acad Sci USA. 2003; 100: 8688-8691). Additionally, many other natural serine recombinases having an N-terminal catalytic domain and a C-terminal DNA binding domain are known (e.g., phiC31 integrase, TnpX transposase, IS607 transposase), and their catalytic domains can be co-opted to engineer programmable site-specific recombinases as described herein (See, e.g., Smith et al., “Diversity in the serine recombinases.” Mol Microbiol. 2002; 44: 299-307, the entire contents of which are incorporated by reference). Similarly, the core catalytic domains of tyrosine recombinases (e.g., Cre, 1 integrase) are known, and can be similarly co-opted to engineer programmable site-specific recombinases as described herein (See, e.g., Guo et al., “Structure of Cre recombinase complexed with DNA in a site-specific recombination synapse.” Nature. 1997; 389:40-46; Hartung et al., “Cre mutants with altered DNA binding properties.” J Biol Chem 1998; 273:22884-22891; Shaikh et al., “Chimeras of the Flp and Cre recombinases: Tests of the mode of cleavage by Flp and Cre. J Mol Biol. 2000; 302:27-48; Rongrong et al., “Effect of deletion mutation on the recombination activity of Cre recombinase.” Acta Biochim Pol. 2005; 52:541-544; Kilbride et al., “Determinants of product topology in a hybrid Cre-Tn3 resolvase site-specific recombination system.” J Mol Biol. 2006; 355:185-195; Warren et al., “A chimeric cre recombinase with regulated directionality.” Proc Natl Acad Sci USA. 2008 105:18278-18283; Van Duyne, “Teaching Cre to follow directions.” Proc Natl Acad Sci USA. 2009 Jan. 6; 106(1):4-5; Numrych et al., “A comparison of the effects of single-base and triple-base changes in the integrase arm-type binding sites on the site-specific recombination of bacteriophage 1.” Nucleic Acids Res. 1990; 18:3953-3959; Tirumalai et al., “The recognition of core-type DNA sites by 1 integrase.” J Mol Biol. 1998; 279:513-527; Aihara et al., “A conformational switch controls the DNA cleavage activity of 1 integrase.” Mol Cell. 2003; 12:187-198; Biswas et al., “A structural basis for allosteric control of DNA recombination by 1 integrase.” Nature. 2005; 435:1059-1066; and Warren et al., “Mutations in the amino-terminal domain of 1-integrase have differential effects on integrative and excisive recombination.” Mol Microbiol. 2005; 55:1104-1112; the entire contents of each are incorporated by reference).

### Cas12a (Cas Type V) Prime Editor/Recombinase System

[0577] In another aspect, Cas12a may be able to be combined with prime editing (“Cas12a PE” wherein Cas12a is used in place of Cas9) and a recombinase to insert recombinase sites (or “recombinase recognition sequences”) into a desired genomic site. Insertion of recombinase sites provides a programmed location for effecting site-specific genetic changes in a genome. Such genetic changes can include, for example, genomic integration of a plasmid, genomic deletion or insertion, chromosomal translocations, and cassette exchanges, among other genetic changes. The installed recombinase recognition sequences may then be used to conduct site-specific recombination at that site to effecuate a variety of recombination outcomes, such as, excision, integration, inversion, or exchange of DNA fragments.

[0578] The mechanism of installing a recombinase site using a Cas12a prime editor into the genome is analogous to installing other sequences, such as peptide/protein and RNA tags, into the genome. The process begins with selecting a desired target locus into which the recombinase target sequence will be introduced. Next, a Cas12a prime editor system is provided (“RT-Cas12a:gRNA”). Here, the “gRNA” refers to a PEgRNA, which includes an extended region comprising the RT template that encodes a recombinase integration site for installing in a site in a genome.

[0579] In various aspects, the present disclosure provides for the use of a Cas12a PE to introduce recombinase recognition sequences at high-value loci in human or other genomes, which, after exposure to site-specific recombinase(s), will direct precise and efficient genomic modifications. In various embodiments, a single SSR target may be installed by Cas12a PE for use as a site for genomic integration of a DNA donor template. Cas12a PE-mediated introduction of recombinase recognition sequences could be particularly useful for the treatment of genetic diseases which are caused by large-scale genomic defects, such as gene loss, inversion, or duplication, or chromosomal translocation. For example, Williams-Beuren syndrome is a developmental disorder caused by a deletion of 24 in chromosome 721. No technology exists currently for the efficient and targeted insertion of multiple entire genes in living cells; however, recombinase-mediated integration at a target inserted by Cas12a PE offers one approach towards a permanent cure for this and other diseases. In addition, targeted introduction of recombinase recognition sequences could be highly enabling for applications including generation of transgenic plants, animal research models, bioproduction cell lines, or other custom eukaryotic cell lines. For example, recombinase-mediated genomic rearrangement in transgenic plants at PE-specific targets could overcome one of the bottlenecks to generating agricultural crops with improved properties^{8,9}.

[0580] In various other aspects, the present disclosure relates to methods of using Cas12a PE to install one or more recombinase recognition sequence and their use in site-specific recombination.

[0581] In some embodiments, the site-specific recombination may effecuate a variety of recombination outcomes, such as, excision, integration, inversion, or exchange of DNA fragments.

[0582] In some embodiments, the methods are useful for inducing recombination of or between two or more regions of two or more nucleic acid (e.g., DNA) molecules. In other embodiments, the methods are useful for inducing recombination of or between two or more regions in a single nucleic acid molecule (e.g., DNA).

[0583] In some embodiments, the disclosure provides a method for integrating a donor DNA template by site-specific recombination, comprising: (a) installing a recombinase recognition sequence at a genomic locus by prime editing; (b) contacting the genomic locus with a DNA donor template that also comprises the recombinase recognition sequence in the presence of a recombinase.

[0584] In other embodiments, the disclosure provides a method for deleting a genomic region by site-specific recombination, comprising: (a) installing a pair of recombinase recognition sequences at a genomic locus by prime editing; (b) contacting the genomic locus with a recombinase, thereby catalyzing the deletion of the genomic region between the pair of recombinase recognition sequences.

[0585] In yet other embodiments, the disclosure provides a method for inverting a genomic region by site-specific recombination, comprising: (a) installing a pair of recombinase recognition sequences at a genomic locus by prime editing; (b) contacting the genomic locus with a recombinase, thereby catalyzing the inversion of the genomic region between the pair of recombinase recognition sequences.

[0586] In still other embodiments, the disclosure provides a method for inducing chromosomal translocation between a first genomic site and a second genomic site, comprising: (a) installing a first recombinase recognition sequence at a first genomic locus by prime editing; (b) installing a second recombinase recognition sequence at a second genomic locus by prime editing; (c) contacting the first and the second genomic loci with a recombinase, thereby catalyzing the chromosomal translocation of the first and second genomic loci.

[0587] In other embodiments, the disclosure provides a method for inducing cassette exchange between a genomic locus and a donor DNA comprising a cassette, comprising: (a) installing a first recombinase recognition sequence at a first genomic locus by prime editing; (b) installing a second recombinase recognition sequence at a second genomic locus by prime editing; (c) contacting the first and the second genomic loci with a donor DNA comprising a cassette that is flanked by the first and second recombinase recognition sequences and a recombinase, thereby catalyzing the exchange of the flanked genomic locus and the cassette in the DNA donor.

[0588] In various embodiments involving the insertion of more than one recombinase recognition sequences in the genome, the recombinase recognition sequences can be the same or different. In some embodiments, the recombinase recognition sequences are the same. In other embodiments, that recombinase recognition sequences are different.

[0589] In various embodiments, the recombinase can be a tyrosine recombinase, such as Cre, Dre, Vcre, Scre, Flp, B2, B3, Kw, R, TD1-40, Vika, Nigri, Panto, Kd, Fre, Cre(ALSHG), Tre, Brecl, or Cre-R3M3. In such embodiments, the recombinase recognition sequence may be a cognate RRS that corresponds to the recombinase under use.

[0590] In various other embodiments, the recombinase can be a large serine recombinase, such as Bxb1, PhiC31, R4, phiBT1, MJ1, MR11, TP901-1, A118, V153, phiRV1, phi370.1, TG1, WB, BL3, SprA, phiJoe, phiK38, Int2, Int3, Int4, Int7, Int8, Int9, Int10, Int11, Int12, Int13, L1, peaches, Bxz2, or SV1. In such embodiments, the recombinase recognition sequence may be a cognate RRS that corresponds to the recombinase under use.

[0591] In still other embodiments, the recombinase can be a serine recombinase, such as Bxbl, PhiC31, R4, phiBT1, MJ1, MR11, TP901-1, A118, V153, phiRV1, phi370.1, TG1, WB, BL3, SprA, phiJoe, phiK38, Int2, Int3, Int4, Int7, Int8, Int9, Int10, Int11, Int12, Int13, L1, peaches, Bxz2, or SV1. In such embodiments, the recombinase recognition sequence may be a cognate RRS that corresponds to the recombinase under use.

[0592] In other embodiments, the recombinase can be a serine resolvase, such as Gin, Cin, Hin, Min, or Sin. In such embodiments, the recombinase recognition sequence may be a cognate RRS that corresponds to the recombinase under use.

[0593] In various other embodiments, the recombinase can be a tyrosine integrase, such as HK022, P22, or L5. In such embodiments, the recombinase recognition sequence may be a cognate RRS that corresponds to the recombinase under use.

[0594] In some embodiments, any of the methods for site-specific recombination with Cas12a PE can be performed in vivo or in vitro. In some embodiments, any of the methods for site-specific recombination are performed in a cell (e.g., recombine genomic DNA in a cell). The cell can be prokaryotic or eukaryotic. The cell, such as a eukaryotic cell, can be in an individual, such as a subject, as described herein (e.g., a human subject). The methods described herein are useful for the genetic modification of cells in vitro and in vivo, for example, in the context of the generation of transgenic cells, cell lines, or animals, or in the alteration of genomic sequence, e.g., the correction of a genetic defect, in a cell in a subject.

### F. Delivery of Cas12 (or Cas Type V) Gene Editing Systems

### Overview

[0595] In yet another aspect, the disclosure provides vectors for transferring and/or expressing said Cas12a (or Cas Type V)-based gene editing systems, e.g., under in vitro, ex vivo, and in vivo conditions. In still another aspect, the disclosure provides cell-delivery compositions and methods, including compositions for passive and/or active transport to cells (e.g., plasmids), delivery by virus-based recombinant vectors (e.g., AAV and/or lentivirus vectors), delivery by non-virus-based systems (e.g., liposomes and LNPs), and delivery by virus-like particles of the Cas12a-based gene editing systems described herein. Depending on the delivery system employed, the Cas12a-based gene editing systems described herein may be delivered in the form of DNA (e.g., plasmids or DNA-based virus vectors), RNA (e.g., guide RNA and mRNA delivered by LNPs), a mixture of DNA and RNA, protein (e.g., virus-like particles), and ribonucleoprotein (RNP) complexes. Any suitable combinations of approaches for delivering the components of the herein disclosed Cas12a-based gene editing systems may be employed.

[0596] The Cas12a (or Cas Type V) editing systems and/or components thereof can be delivered by any known delivery system such as those described above, including (a) without vectors (e.g., electroporation), (b) viral delivery systems and (c) non-viral delivery systems. Viral delivery systems include expression vectors, adeno-associated virus (AAV) vectors, retroviral vectors, lentiviral vectors, and the like. An expression construct can be replicated in a living cell, or it can be made synthetically. Non-viral delivery systems include without limitation lipid particles (e.g. Lipid nanoparticles (LNPs)), non-lipid nanoparticles, exosomes, liposomes, micelles, viral particles, stable nucleic-acid-lipid particles (SNALPs), lipoplexes/polyplexes, DNA nanoclews, Gold nanoparticles, iTOP, Streptolysin O (SLO), multifunctional envelope-type nanodevice (MEND), lipid-coated mesoporous silica particles, inorganic nanoparticles, and polymeric delivery technology (e.g., polymer-based particles).

[0597] Delivery of nucleic acid modalities, including RNA therapeutics, is described further in Paunovska K, Loughrey D, Dahlman J E. Drug delivery systems for RNA therapeutics. Nat Rev Genet. 2022 May; 23(5):265-280. doi: 10.1038/s41576-021-00439-4. Epub 2022 Jan. 4. PMID: 34983972; PMCID: PMC8724758; Hong C A, Nam Y S. Functional nanostructures for effective delivery of small interfering RNA therapeutics. Theranostics. 2014 Sep. 19; 4(12):1211-32. doi: 10.7150/thno.8491. PMID: 25285170; PMCID: PMC4183999; Liu F, Wang C, Gao Y, Li X, Tian F, Zhang Y, Fu M, Li P, Wang Y, Wang F. Current Transport Systems and Clinical Applications for Small Interfering RNA (siRNA) Drugs. Mol Diagn Ther. 2018 October; 22(5):551-569. doi: 10.1007/s40291-018-0338-8. PMID: 29926308; Zhang Y, Almazi J G, Ong H X, Johansen M D, Ledger S, Traini D, Hansbro P M, Kelleher A D, Ahlenstiel C L. Nanoparticle Delivery Platforms for RNAi Therapeutics Targeting COVID-19 Disease in the Respiratory Tract. Int J Mol Sci. 2022 Feb. 22; 23(5):2408. doi: 10.3390/ijms23052408. PMID: 35269550; PMCID: PMC8909959; Zhang M, Hu S, Liu L, Dang P, Liu Y, Sun Z, Qiao B, Wang C. Engineered exosomes from different sources for cancer-targeted therapy. Signal Transduct Target Ther. 2023 Mar. 15; 8(1):124. doi: 10.1038/s41392-023-01382-y. PMID: 36922504; PMCID: PMC10017761; Hastings M L, Krainer A R. RNA therapeutics. RNA. 2023 April; 29(4):393-395. doi: 10.1261/rna.079626.123. PMID: 36928165; PMCID: PMC10019368; Miele E, Spinelli G P, Miele E, Di Fabrizio E, Ferretti E, Tomao S, Gulino A. Nanoparticle-based delivery of small interfering RNA: challenges for cancer therapy. Int J Nanomedicine. 2012; 7:3637-57. doi: 10.2147/IJN.S23696. Epub 2012 Jul. 20. PMID: 22915840; PMCID: PMC3418108, each of which are incorporated by reference in their entireties.

[0598] The engineered Cas12a (or Cas Type V) editing systems (or vectors containing them) may be introduced into any type of cell, including any cell from a prokaryotic, eukaryotic, or archaeon organism, including bacteria, archaea, fungi, protists, plants (e.g., monocotyledonous and dicotyledonous plants); and animals (e.g., vertebrates and invertebrates). Examples of animals that may be transfected with an engineered Cas12a editing system include, without limitation, vertebrates such as fish, birds, mammals (e.g., human and non-human primates, farm animals, pets, and laboratory animals), reptiles, and amphibians.

[0599] The engineered Cas12a (or Cas Type V) editing systems can be introduced into a single cell or a population of cells. Cells from tissues, organs, and biopsies, as well as recombinant cells, genetically modified cells, cells from cell lines cultured in vitro, and artificial cells (e.g., nanoparticles, liposomes, polymersomes, or microcapsules encapsulating nucleic acids) may all be transfected with the engineered Cas12a editing systems.

[0600] The engineered Cas12a (or Cas Type V) editing systems can be introduced into cellular fragments, cell components, or organelles (e.g., mitochondria in animal and plant cells, plastids (e.g., chloroplasts) in plant cells and algae).

[0601] Cells may be cultured or expanded after transfection with the engineered Cas12a editing systems.

[0602] Methods of introducing nucleic acids into a host cell are well known in the art. Commonly used methods include chemically induced transformation, typically using divalent cations (e.g., CaCl₂), dextran-mediated transfection, polybrene mediated transfection, lipofectamine and LT-1 mediated transfection, electroporation, protoplast fusion, encapsulation of nucleic acids in liposomes, and direct microinjection of the nucleic acids comprising Cas12a editing systems into nuclei. See, e.g., Sambrook et al. (2001) Molecular Cloning, a laboratory manual, 3rd edition, Cold Spring Harbor Laboratories, New York, Davis et al. (1995) Basic Methods in Molecular Biology, 2nd edition, McGraw-Hill, and Chu et al. (1981) Gene 13:197; herein incorporated by reference in their entireties.

[0603] Plant cells may also be targeted by the Cas12a editing systems disclosed herein. Methods for genetic transformation of plant cells are known in the art and include those set forth in US2022/0145296, and U.S. Pat. Nos. 8,575,425; 7,692,068; 8,802,934; 7,541,517; each of which is herein incorporated by reference in its entirety. See, also, Rakoczy-Trojanowska, M. (2002) Cell Mol Biol Lett. 7:849-858; Jones et al. (2005) Plant Methods 1:5; Rivera et al. (2012) Physics of Life Reviews 9:308-345; Bartlett et al. (2008) Plant Methods 4:1-12; Bates, G. W. (1999) Methods in Molecular Biology 111:359-366; Binns and Thomashow (1988) Annual Reviews in Microbiology 42:575-606; Christou, P. (1992) The Plant Journal 2:275-281; Christou, P. (1995) Euphytica 85:13-27; Tzfira et al. (2004) TRENDS in Genetics 20:375-383; Yao et al. (2006) Journal of Experimental Botany 57:3737-3746; Zupan and Zambryski (1995) Plant Physiology 107:1041-1047; and Jones et al. (2005) Plant Methods 1:5.

[0604] The plant cells that have been transformed may be grown into a transgenic organism, such as a plant, in accordance with conventional methods. See, for example, McCormick et al. (1986) Plant Cell Reports 5:81-84.

[0605] Plant material that may be transformed with the Cas12a editing systems described herein includes plant cells, plant protoplasts, plant cell tissue cultures from which plants can be regenerated, plant calli, plant clumps, and plant cells that are intact in plants or parts of plants such as embryos, pollen, ovules, seeds, leaves, flowers, branches, fruit, kernels, ears, cobs, husks, stalks, roots, root tips, anthers, and the like. Progeny, variants, and mutants of the regenerated plants are also included within the scope of the disclosure, provided that these parts comprise the genetic modification introduced by the Cas12a editing systems. Further provided is a processed plant product or byproduct that retains the genetic modification introduced by the Cas12a editing systems.

[0606] The Cas12a editing systems described herein may be used to produce transgenic plants with desired phenotypes, including but not limited to, increased disease resistance (e.g., increased viral, bacterial of fungal resistance), increased insect resistance, increased drought resistance, increased yield, and altered fruit ripening characteristics, sugar and oil composition, and color.

[0607] In some embodiments involving Cas12a-based retron editing systems, the retron msr gene, msd gene, and/or ret gene can be expressed in vitro from a vector, such as in an in vitro transcription system. The resulting ncRNA or msDNA can be isolated before being packaged and/or formulated for direct delivery into a host cell. For example, the isolated ncRNA or msDNA can be packaged/formulated in a delivery vehicle such as lipid nanoparticles as described in other sections.

[0608] In some embodiments involving Cas12a-based retron editing systems, the retron msr gene, msd gene, and/or ret gene are expressed in vivo from a vector within a cell. The retron msr gene, msd gene, and/or ret gene can be introduced into a cell with a single vector or in multiple separate vectors to produce msDNA in a host subject.

[0609] In other embodiments, the retron msr gene, msd gene, and/or ret gene, and any other components of the retron-based genome editing systems described herein (e.g., guide RNA in trans, programmable nuclease (e.g., in trans)) may be expressed in vivo from RNA delivered to the cell. The retron msr gene, msd gene, and/or ret gene can be introduced into a cell with a single vector or in multiple separate vectors to produce msDNA in a host subject.

[0610] Vectors and/or nucleic acid molecules encoding the recombinant retron-based genome editing system or components thereof can include control elements operably linked to the retron sequences, which allow for the production of msDNA either in vitro, or in vivo in the subject species. For example, in embodiments relating to Cas12a-based retron editors, the retron msr gene, msd gene, and/or ret gene can be operably linked to a promoter to allow expression of the retron reverse transcriptase and/or the msDNA product. In some embodiments, heterologous sequences encoding desired products of interest (e.g., polynucleotide encoding polypeptide or regulatory RNA, donor polynucleotide for gene editing, or protospacer DNA for molecular recording) may be inserted in the msr gene and/or msd gene.

[0611] In some embodiments, the Cas12a editing systems are produced by a vector system comprising one or more vectors.

[0612] Numerous vectors are available for use in the vector or vector system, including but not limited to, linear polynucleotides, polynucleotides associated with ionic or amphiphilic compounds, plasmids, and viruses.

### Viral Vector Delivery

[0613] In various embodiments, the Cas12a (or Cas Type V)-based editing systems described herein may be delivered in viral vectors.

[0614] Examples of viral vectors include, but are not limited to, adenoviral vectors, adeno-associated virus (AAV) vectors, retroviral vectors, lentiviral vectors, and the like. An expression construct can be replicated in a living cell, or it can be made synthetically.

[0615] In some embodiments, the nucleic acid comprising an Cas12a (or Cas Type V) editing system sequence is under transcriptional control of a promoter. In some embodiments, the promoter is competent for initiating transcription of an operably linked coding sequence by a RNA polymerase I, II, or III.

[0616] Exemplary promoters for mammalian cell expression include the SV40 early promoter, a CMV promoter such as the CMV immediate early promoter (see, U.S. Pat. Nos. 5,168,062 and 5,385,839, incorporated herein by reference in their entireties), the mouse mammary tumor virus LTR promoter, the adenovirus major late promoter (Ad MLP), and the herpes simplex virus promoter, among others. Other nonviral promoters, such as a promoter derived from the murine metallothionein gene, will also find use for mammalian expression.

[0617] Exemplary promoters for plant cell expression include the CaMV 35S promoter (Odell et al., 1985, Nature 313:810-812); the rice actin promoter (McElroy et al., 1990, Plant Cell 2:163-171); the ubiquitin promoter (Christensen et al., 1989, Plant Mol. Biol. 12:619-632; and Christensen et al., 1992, Plant Mol. Biol. 18:675-689); the pEMU promoter (Last et al., 1991, Theor. Appl. Genet. 81:581-588); and the MAS promoter (Velten et al., 1984, EMBO J. 3:2723-2730).

[0618] In additional embodiments, the retron-based vectors may also comprise tissue-specific promoters to start expression only after it is delivered into a specific tissue. Non-limiting exemplary tissue-specific promoters include B29 promoter, CD14 promoter, CD43 promoter, CD45 promoter, CD68 promoter, desmin promoter, elastase-1 promoter, endoglin promoter, fibronectin promoter, Flt-1 promoter, GFAP promoter, GPIIb promoter, ICAM-2 promoter, INF-b promoter, Mb promoter, Nphsl promoter, OG-2 promoter, SP-B promoter, SYN1 promoter, and WASP promoter.

[0619] These and other promoters can be obtained from or incorporated into commercially available plasmids, using techniques well known in the art. See, e.g., Sambrook et al., supra.

[0620] In some embodiments, one or more enhancer elements is/are used in association with the promoter to increase expression levels of the constructs. Examples include the SV40 early gene enhancer, as described in Dijkema et al., EMBOJ (1985) 4:761, the enhancer/promoter derived from the long terminal repeat (LTR) of the Rous Sarcoma Virus, as described in Gorman et al., Proc. Natl. Acad. Sci. USA (1982b) 79:6777, and elements derived from human CMV, as described in Boshart et al., Cell (1985) 41:521, such as elements included in the CMV intron A sequence. All such sequences are incorporated herein by reference.

[0621] In one embodiment, an expression vector for expressing an Cas12a (or Cas Type V) editing system, comprises a promoter operably linked to a polynucleotide encoding the Cas12a editing system components.

[0622] In some embodiments, the vector or vector system also comprises a transcription terminator/polyadenylation signal. Examples of such sequences include, but are not limited to, those derived from SV40, as described in Sambrook et al., supra, as well as a bovine growth hormone terminator sequence (see, e.g., U.S. Pat. No. 5,122,458).

[0623] Additionally, 5′-UTR sequences can be placed adjacent to the coding sequence to further enhance the expression. Such sequences may include UTRs comprising an internal ribosome entry site (IRES). Inclusion of an IRES permits the translation of one or more open reading frames from a vector. The IRES element attracts a eukaryotic ribosomal translation initiation complex and promotes translation initiation. See, e.g., Kaufman et al., Nuc. Acids Res. (1991) 19:4485-4490; Gurtu et al., Biochem. Biophys. Res. Comm. (1996) 229:295-298: Rees et al., BioTechniques (1996) 20:102-110; Kobayashi et al., BioTechniques (1996) 21:399-402; and Mosser et al., BioTechniques (199722 ISO-161)c. A multitude of IRES sequences are known and include sequences derived from a wide variety of viruses, such as from leader sequences of picomaviruses such as the encephalomyocarditis virus (EMCV) UTR (Jang et al.. Virol. (1989) 63:1651-1660). the polio leader sequence, the hepatitis A virus leader, the hepatitis C virus IRES, human rhinovirus type 2 IRES (Dobrikova et al., Proc. Natl. Acad. Sci. (2003) 100(251:15125-151301)). an IRES element from the foot and mouth disease virus (Ramesh et al., Nucl. Acid Res. (1996) 24:2697-2700), a giardiavirus IRES (Garlapati et al., J Biol. Chem. (2004) 279(51):3389-33971) and the like. A variety of nonviral IRES sequences will also find use herein, including, but not limited to IRES sequences from yeast, as well as the human angiotensin II type 1 receptor IRES (Martin et al., Mol. Cell Endocrinol. (2003) 212:51-61), fibroblast growth factor IRESs (FGF-1 IRES and FGF-2 IRES, Martineau et al. (2004) Mol. Cell. Biol. 24(17): 7622-7635), vascular endothelial growth factor IRES (Baranick et al. (2008) Proc. Natl. Acad Sci. U.S.A. 105(12):4733-4738, Stein et al. (1998) Mol. Cell. Biol. 18(6):3112-3119, Bert et al. (2006) RNA 12(6): 1074-1083), and insulin-like growth factor 2 IRES (Pedersen et al. (2002) Biochem. J. 363(Pt 1):37-44).

[0624] These elements are commercially available in plasmids sold, e.g., by Clontech (Mountain View, CA), Invivogen (San Diego, CA), Addgene (Cambridge, MA) and GeneCopoeia (Rockville, MD). See also IRESite: The database of experimentally verified IRES structures (iresite.org). An IRES sequence may be included in a vector, for example, to express multiple bacteriophage recombination proteins for recombineering or an RNA-guided nuclease (e.g., Cas9) for HDR in combination with a retron reverse transcriptase from an expression cassette.

[0625] In some embodiments, a polynucleotide encoding a viral self-cleaving 2A peptide, such as a T2A peptide, can be used to allow production of multiple protein products (e.g., Cas9, bacteriophage recombination proteins, retron reverse transcriptase) from a single vector or a single transcription unit under one promoter. One or more 2A linker peptides can be inserted between the coding sequences in the multicistronic construct. The 2A peptide, which is self-cleaving, allows co-expressed proteins from the multicistronic construct to be produced at equimolar levels. 2A peptides from various viruses may be used, including, but not limited to 2A peptides derived from the foot-and-mouth disease virus, equine rhinitis A virus, Jhosea asigna virus and porcine teschovirus-1. See, e.g., Kim et al. (2011) PLoS One 6(4): e18556, Trichas et al. (2008) BMC Biol. 6:40, Provost et al. (2007) Genesis 45(10): 625-629, Furler et al. (2001) Gene Ther. 8(11):864-873; herein incorporated by reference in their entireties.

[0626] In some embodiments, the expression construct comprises a plasmid suitable for transforming a bacterial host. Numerous bacterial expression vectors are known to those of skill in the art, and the selection of an appropriate vector is a matter of choice. Bacterial expression vectors include, but are not limited to, pACYC177, pASK75, pBAD, pBADM, pBAT, pCal, pET, pETM, pGAT, pGEX, pHAT, pKK223, pMal, pProEx, pQE, and pZA31 Bacterial plasmids may contain antibiotic selection markers (e.g., ampicillin, kanamycin, erythromycin, carbenicillin, streptomycin, or tetracycline resistance), a lacZ gene (b-galactosidase produces blue pigment from x-gal substrate), fluorescent markers (e.g., GFP. mCherry), or other markers for selection of transformed bacteria. See, e.g., Sambrook et al., supra.

[0627] In other embodiments, the expression construct comprises a plasmid suitable for transforming a yeast cell. Yeast expression plasmids typically contain a yeast-specific origin of replication (ORI) and nutritional selection markers (e.g., HIS3, URA3, LYS2, LEU2, TRP1, METIS, ura4+, leu1+, ade6+), antibiotic selection markers (e.g., kanamycin resistance), fluorescent markers (e.g., mCherry), or other markers for selection of transformed yeast cells. The yeast plasmid may further contain components to allow shuttling between a bacterial host (e.g., E coif) and yeast cells. A number of different types of yeast plasmids are available including yeast integrating plasmids (Yip), which lack an ORI and are integrated into host chromosomes by homologous recombination; yeast replicating plasmids (YRp), which contain an autonomously replicating sequence (ARS) and can replicate independently; yeast centromere plasmids (YCp), which are low copy vectors containing a part of an ARS and part of a centromere sequence (CEN); and yeast episomal plasmids (YEp), which are high copy number plasmids comprising a fragment from a 2 micron circle (a natural yeast plasmid) that allows for 50 or more copies to be stably propagated per cell.

[0628] In other embodiments, the expression construct does not comprise a plasmid suitable for transforming a yeast cell.

[0629] In other embodiments, the expression construct comprises a virus or engineered construct derived from a viral genome. A number of viral based systems have been developed for gene transfer into mammalian cells. These include adenoviruses, retroviruses (g-retroviruses and lentiviruses), poxviruses, adeno-associated viruses, baculoviruses, and herpes simplex viruses (see e.g., Wamock et al. (2011) Methods Mol. Biol. 737:1-25; Walther et al. (2000) Drugs 60(2):249-271; and Lundstrom (2003) Trends Biotechnol. 21(3): 117-122; herein incorporated by reference in their entireties). The ability of certain viruses to enter cells via receptor-mediated endocytosis, to integrate into host cell genomes and express viral genes stably and efficiently have made them attractive candidates for the transfer of foreign genes into mammalian cells.

[0630] For example, retroviruses provide a convenient platform for gene delivery systems. Selected sequences can be inserted into a vector and packaged in retroviral particles using techniques known in the art. The recombinant virus can then be isolated and delivered to cells of the subject either in vivo or ex vivo. A number of retroviral systems have been described (U.S. Pat. No. 5,219,740; Miller and Rosman (1989) BioTechniques 7:980-990; Miller, A. D. (1990) Human Gene Therapy 1:5-14; Scarpa et al. (1991) Virology 180:849-852; Burns et al. (1993) Proc. Natl. Acad. Sci. USA 90:8033-8037; Boris-Lawrie and Temin (1993) Cur. Opin. Genet. Develop. 3:102-109; and Ferry et al. (2011) Curr. Pharm. Des. 17(24): 2516-2527). Lentiviruses are a class of retroviruses that are particularly useful for delivering polynucleotides to mammalian cells because they are able to infect both dividing and nondividing cells (see e.g., Lois et al. (2002) Science 295:868-872; Durand et al. (2011) Viruses 3(2): 132-159; herein incorporated by reference).

[0631] A number of adenoviral vectors have also been described. Unlike retroviruses which integrate into the host genome, adenoviruses persist extrachromosomally thus minimizing the risks associated with insertional mutagenesis.

[0632] Additionally, various adeno-associated vims (AAV) vector systems have been developed for gene delivery. AAV vectors can be readily constructed using techniques well known in the art. See, e.g., U.S. Pat. Nos. 5,173,414 and 5,139,941; International Publication Nos. WO 92/01070 (published 23 Jan. 1992) and WO 93/03769 (published 4 Mar. 1993); Lebkowski et al., Molec. Cell. Biol. (1988) 8:3988-3996; Vincent et al., Vaccines 90 (1990) (Cold Spring Harbor LaboratoryPress); Carter, B. J. Current Opinion in Biotechnology (1992) 3:533-539; Muzyczka, N. Current Topics in Microbiol and Immunol. (1992) 158:97-129; Kotin, R. M. Human Gene Therapy (1994) 5:793-801; Shelling and Smith, Gene Therapy (1994) 1:165-169; and Zhou et al., J. Exp. Med. (1994) 179:1867-1875.

[0633] Another vector system useful for delivering nucleic acids encoding the Cas12a editing system components is the enterically administered recombinant poxvirus vaccines described by Small, Jr., P. A., et al. (U.S. Pat. No. 5,676,950, issued Oct. 14, 1997, herein incorporated by reference).

[0634] Other viral vectors include those derived from the pox family of viruses, including vaccinia virus and avian poxvirus. By way of example, vaccinia virus recombinants expressing a nucleic acid molecule of interest (e.g., Cas12a editing system) can be constructed as follows. The DNA encoding the particular nucleic acid sequence is first inserted into an appropriate vector so that it is adjacent to a vaccinia promoter and flanking vaccinia DNA sequences, such as the sequence encoding thymidine kinase (TK). This vector is then used to transfect cells which are simultaneously infected with vaccinia. Homologous recombination serves to insert the vaccinia promoter plus the gene encoding the sequences of interest into the viral genome. The resulting TK-recombinant can be selected by culturing the cells in the presence of 5-bromodeoxyuridine and picking viral plaques resistant thereto.

[0635] In some embodiments, avipoxviruses, such as the fowlpox and canarypox viruses, can also be used to deliver the nucleic acid molecules of interest. The use of an avipox vector is particularly desirable in human and other mammalian species since members of the avipox genus can only productively replicate in susceptible avian species and therefore are not infective in mammalian cells. Methods for producing recombinant avipoxviruses are known in the art and employ genetic recombination, as described above with respect to the production of vaccinia viruses. See, e.g., WO 91/12882; WO 89/03429; and WO 92/03545.

[0636] Molecular conjugate vectors, such as the adenovirus chimeric vectors described in Michael et al., J. Biol. Chem. (1993) 268:6866-6869 and Wagner et al., Proc. Natl. Acad. Sci. USA (1992) 89:6099-6103, can also be used for gene delivery.

[0637] Members of the alphavirus genus, such as, but not limited to, vectors derived from the Sindbis virus (SIN), Semliki Forest virus (SFV), and Venezuelan Equine Encephalitis virus (VEE), will also find use as viral vectors for delivering the polynucleotides of the present invention. For a description of Sindbis-virus derived vectors useful for the practice of the instant methods, see, Dubensky et al. (1996) J. Virol. 70:508-519; and International Publication Nos. WO 95/07995, WO 96/17072; as well as, Dubensky, Jr., T. W., et al., U.S. Pat. No. 5,843,723, issued Dec. 1, 1998, and Dubensky, Jr., T. W., U.S. Pat. No. 5,789,245, issued Aug. 4, 1998, both herein incorporated by reference. Particularly preferred are chimeric alphavirus vectors comprised of sequences derived from Sindbis virus and Venezuelan equine encephalitis virus. See, e.g., Perri et al. (2003) J. Virol. 77: 10394-10403 and International Publication Nos. WO 02/099035, WO 02/080982, WO 01/81609, and WO 00/61772; herein incorporated by reference in their entireties.

[0638] A vaccinia-based infection/transfection system can be conveniently used to provide for inducible, transient expression of the nucleic acids of interest (e.g., Cas12a editing system) in a host cell. In this system, cells are first infected in vitro with a vaccinia virus recombinant that encodes the bacteriophage T7 RNA polymerase. This polymerase displays exquisite specificity in that it only transcribes templates bearing T7 promoters. Following infection, cells are transfected with the nucleic acid of interest, driven by a T7 promoter. The polymerase expressed in the cytoplasm from the vaccinia virus recombinant transcribes the transfected DNA into RNA. The method provides for high level, transient, cytoplasmic production of large quantities of RNA. See, e.g., Elroy-Stein and Moss, Proc. Natl. Acad. Sci. USA (1990) 87:6743-6747; Fuerst et al., Proc. Natl. Acad. Sci. USA (1986) 83:8122-8126.

[0639] In other approaches to infection with vaccinia or avipox virus recombinants, or to the delivery of nucleic acids using other viral vectors, an amplification system can be used that will lead to high level expression following introduction into host cells. Specifically, a T7 RNA polymerase promoter preceding the coding region for T7 RNA polymerase can be engineered. Translation of RNA derived from this template will generate T7 RNA polymerase which in turn will transcribe more templates. Concomitantly, there will be a cDNA whose expression is under the control of the T7 promoter. Thus, some of the T7 RNA polymerase generated from translation of the amplification template RNA will lead to transcription of the desired gene. Because some T7 RNA polymerase is required to initiate the amplification, T7 RNA polymerase can be introduced into cells along with the template(s) to prime the transcription reaction. The polymerase can be introduced as a protein or on a plasmid encoding the RNA polymerase. For a further discussion of T7 systems and their use for transforming cells, see, e.g., International Publication No. WO 94/26911; Studier and Moffatt, J. Mol. Biol. (1986) 189:113-130; Deng and Wolff, Gene (1994) 143:245-249; Gao et al., Biochem. Biophys. Res. Commun. (1994) 200:1201-1206; Gao and Huang, Nuc. Acids Res. (1993) 21:2867-2872; Chen et al., Nuc. Acids Res. (1994) 22:2114-2120; and U.S. Pat. No. 5,135,855.

[0640] Insect cell expression systems, such as baculovirus systems, can also be used and are known to those of skill in the art and described in, e.g., Baculovirus and Insect Cell Expression Protocols (Methods in Molecular Biology, D. W. Murhammer ed., Humana Press, 2nd edition, 2007) and L. King The Baculovirus Expression System: A laboratory guide (Springer, 1992). Materials and methods for baculovirus/insect cell expression systems are commercially available in kit form from, inter alia, Thermo Fisher Scientific (Waltham, MA) and Clontech (Mountain View, CA).

[0641] Plant expression systems can also be used for transforming plant cells. Generally, such systems use virus-based vectors to transfect plant cells with heterologous genes. For a description of such systems see, e.g., Porta et al., Mol. Biotech. (1996) 5:209-221; and Hackland et al., Arch. Virol. (1994) 139:1-22.

[0642] To obtain expression of the Cas12a (or Cas Type V) editing system or the ncRNA encoded thereby, the expression construct or the ncRNA must be delivered into a cell. This delivery may be accomplished in vitro, as in laboratory procedures for transforming cells lines, or in vivo or ex vivo, as in the treatment of certain disease states. One mechanism for delivery is via viral infection where the expression construct is encapsulated in an infectious viral particle.

### Non-Viral Delivery Methods

[0643] Several non-viral methods for the transfer of expression constructs are available for delivering the Cas12a (or Cas Type V) editing systems or components thereof into cells also are contemplated. These include the use of calcium phosphate precipitation, DEAE-dextran, electroporation, direct microinjection, DNA-loaded liposomes, lipofectamine-DNA complexes, cell sonication, gene bombardment using high velocity microprojectiles, and receptor-mediated transfection (see, e.g., Graham and Van Der Eb (1973) Virology 52:456-467; Chen and Okayama (1987) Mol. Cell Biol. 7:2745-2752; Rippe et al. (1990) Mol. Cell Biol. 10:689-695; Gopal (1985) Mol. Cell Biol. 5:1188-1190; Tur-Kaspa et al. (1986) Mol. Cell. Biol. 6:716-718; Potter et al. (1984) Proc. Natl. Acad. Sci. USA 81:7161-7165); Harland and Weintraub (1985) J. Cell Biol. 101:1094-1099); Nicolau & Sene (1982) Biochim. Biophys. Acta 721:185-190; Fraley et al. (1979) Proc. Natl. Acad. Sci. USA 76:3348-3352; Fechheimer et al. (1987) Proc Natl. Acad. Sci. USA 84:8463-8467; Yang et al. (1990) Proc. Natl. Acad. Sci. USA 87:9568-9572; Wu and Wu (1987) J. Biol. Chem. 262:4429-4432; Wu and Wu (1988) Biochemistry 27:887-892; herein incorporated by reference). Some of these techniques may be successfully adapted for in vivo or ex vivo use.

[0644] In some embodiments, nucleic acid molecules encoding the Cas12a (or Cas Type V) gene editing systems or components thereof may be stably integrated into the genome of the cell. This integration may be in the cognate location and orientation via homologous recombination (gene replacement) or it may be integrated in a random, non-specific location (gene augmentation). In yet further embodiments, the nucleic acid may be stably maintained in the cell as a separate, episomal segment of DNA. Such nucleic acid segments or episomes encode sequences sufficient to permit maintenance and replication independent of or in synchronization with the host cell cycle. How the expression construct is delivered to a cell and where in the cell the nucleic acid remains is dependent on the type of expression construct employed.

[0645] In some embodiments, expression constructs encoding the Cas12a (or Cas Type V) gene editing systems or components thereof may simply consist of naked recombinant DNA or plasmids comprising nucleotide sequences encoding said Cas12a gene editing systems or components thereof. Transfer of the construct may be performed by any of the methods mentioned above which physically or chemically permeabilize the cell membrane. This is particularly applicable for transfer in vitro but it may be applied to in vivo use as well. Dubensky et al. (Proc. Natl. Acad. Sci. USA (1984) 81:7529-7533) successfully injected polyomavirus DNA in the form of calcium phosphate precipitates into liver and spleen of adult and newborn mice demonstrating active viral replication and acute infection. Benvenisty & Neshif (Proc. Natl. Acad. Sci. USA (1986) 83:9551-9555) also demonstrated that direct intraperitoneal injection of calcium phosphate-precipitated plasmids results in expression of the transfected genes. It is envisioned that DNA encoding an Cas12a editing system of interest may also be transferred in a similar manner in vivo and express retron products.

[0646] In still another embodiment, DNA expression constructs encoding the Cas12a (or Cas Type V) gene editing systems or components thereof may be transferred into cells by particle bombardment. This method depends on the ability to accelerate DNA-coated microprojectiles to a high velocity allowing them to pierce cell membranes and enter cells without killing them (Klein et al. (1987) Nature 327:70-73). Several devices for accelerating small particles have been developed. One such device relies on a high voltage discharge to generate an electrical current, which in turn provides the motive force (Yang et al. (1990) Proc. Natl. Acad. Sci. USA 87:9568-9572). The microprojectiles may consist of biologically inert substances, such as tungsten or gold beads.

[0647] In a further embodiment, constructs encoding the Cas12a (or Cas Type V) gene editing systems or components thereof may be delivered using liposomes. Liposomes are vesicular structures characterized by a phospholipid bilayer membrane and an inner aqueous medium. Multilamellar liposomes have multiple lipid layers separated by aqueous medium. They form spontaneously when phospholipids are suspended in an excess of aqueous solution. The lipid components undergo self-rearrangement before the formation of closed structures and entrap water and dissolved solutes between the lipid bilayers (Ghosh & Bachhawat (1991) Liver Diseases, Targeted Diagnosis and Therapy Using Specific Receptors and Ligands, Wu et al. (Eds.), Marcel Dekker, NY, 87-104). Also contemplated is the use of lipofectamine-DNA complexes.

[0648] In some embodiments, the liposome may be complexed with a hemagglutinating virus (HVJ). This has been shown to facilitate fusion with the cell membrane and promote cell entry of liposome-encapsulated DNA (Kaneda et al. (1989) Science 243:375-378). In other embodiments, the liposome may be complexed or employed in conjunction with nuclear non-histone chromosomal proteins (HMG-I) (Kato et al. (1991) J. Biol. Chem. 266(6):3361-3364).

[0649] In yet further embodiments, the liposome may be complexed or employed in conjunction with both HVJ and HMG-I. Where a bacterial promoter is employed in the DNA construct, it also will be desirable to include within the liposome an appropriate bacterial polymerase.

[0650] Other expression constructs encoding the Cas12a (or Cas Type V) gene editing systems or components thereof are receptor-mediated delivery vehicles. These take advantage of the selective uptake of macromolecules by receptor-mediated endocytosis in almost all eukaryotic cells. Because of the cell type-specific distribution of various receptors, the delivery can be highly specific (Wu and Wu (1993) Adv. Drug Delivery Rev. 12:159-167). Receptor-mediated gene targeting vehicles generally consist of two components: a cell receptor-specific ligand and a DNA-binding agent. Several ligands have been used for receptor-mediated gene transfer. The most extensively characterized ligands are asialoorosomucoid (ASOR) and transferrin (see, e.g., Wu and Wu (1987), supra; Wagner et al. (1990) Proc. Natl. Acad. Sci. USA 87(9):3410-3414). A synthetic neoglycoprotein, which recognizes the same receptor as ASOR, has been used as a gene delivery vehicle (Ferkol et al. (1993) FASEB J. 7:1081-1091; Perales et al. (1994) Proc. Natl. Acad. Sci. USA 91(9):4086-4090), and epidermal growth factor (EGF) has also been used to deliver genes to squamous carcinoma cells (Myers, EPO 0273085).

[0651] In other embodiments, delivery vehicle comprising one or more expression constructs encoding the Cas12a gene editing systems or components thereof may comprise a ligand and a liposome. For example, Nicolau et al. (Methods Enzymol. (1987) 149:157-176) employed lactosy 1-ceramide, a galactose-terminal asialoganglioside, incorporated into liposomes and observed an increase in the uptake of the insulin gene by hepatocytes. Thus, it is feasible that a nucleic acid encoding a particular gene also may be specifically delivered into a cell by any number of receptor-ligand systems with or without liposomes. Also, antibodies to surface antigens on cells can similarly be used as targeting moieties.

[0652] In some embodiments, the promoters that may be used in the Cas12a gene editor delivery systems described herein may be constitutive, inducible, or tissue-specific. In some embodiments, the promoters may be a constitutive promoters. Non-limiting exemplary constitutive promoters include cytomegalovirus immediate early promoter (CMV), simian virus (SV40) promoter, adenovirus major late (MLP) promoter, Rous sarcoma virus (RSV) promoter, mouse mammary tumor virus (MMTV) promoter, phosphoglycerate kinase (PGK) promoter, elongation factor-alpha (EFla) promoter, ubiquitin promoters, actin promoters, tubulin promoters, immunoglobulin promoters, a functional fragment thereof, or a combination of any of the foregoing. In some embodiments, the promoter may be a CMV promoter. In some embodiments, the promoter may be a truncated CMV promoter. In other embodiments, the promoter may be an EFla promoter. In some embodiments, the promoter may be an inducible promoter. Non-limiting exemplary inducible promoters include those inducible by heat shock, light, chemicals, peptides, metals, steroids, antibiotics, or alcohol. In some embodiments, the inducible promoter may be one that has a low basal (non-induced) expression level, such as, e.g., the Tet-Ont promoter (Clontech). In some embodiments, the promoter may be a tissue-specific promoter. In some embodiments, the tissue-specific promoter is exclusively or predominantly expressed in liver tissue. Non-limiting exemplary tissue-specific promoters include B29 promoter, CD14 promoter, CD43 promoter, CD45 promoter, CD68 promoter, desmin promoter, elastase-1 promoter, endoglin promoter, fibronectin promoter, Flt-1 promoter, GFAP promoter, GPIIb promoter, ICAM-2 promoter, INF-b promoter, Mb promoter, Nphsl promoter, OG-2 promoter, SP-B promoter, SYN1 promoter, and WASP promoter.

### Lipid Nanoparticles (LNPs)

[0653] In one aspect, the present disclosure further provides delivery systems for delivery of a therapeutic payload (e.g., the Cas12a (or Cas Type V) editing systems or components thereof described herein, or RNA payloads described herein which may encode a polypeptide of interest, e.g., a nucleobase editing system or a therapeutic protein) disclosed herein. In some embodiments, a delivery system suitable for delivery of the therapeutic payload disclosed herein comprises a lipid nanoparticle (LNP) formulation.

[0654] In some embodiments, an LNP of the present disclosure comprises an ionizable lipid, a structural lipid, a PEGylated lipid (aka PEG lipid), and a phospholipid. In alternative embodiments, an LNP comprises an ionizable lipid, a structural lipid, a PEGylated lipid (aka PEG lipid), and a zwitterionic amino acid lipid. In some embodiments, an LNP further comprises a 5th lipid, besides any of the aforementioned lipid components. In some embodiments, the LNP encapsulates one or more elements of the active agent of the present disclosure. In some embodiments, an LNP further comprises a targeting moiety covalently or non-covalently bound to the outer surface of the LNP. In some embodiments, the targeting moiety is a targeting moiety that binds to, or otherwise facilitates uptake by, cells of a particular organ system.

[0655] In some embodiments, an LNP has a diameter of at least about 20 nm, 30 nm, 40 nm, 50 nm, 60 nm, 80 nm, or 90 nm. In some embodiments, an LNP has a diameter of less than about 100 nm, 110 nm, 120 nm, 130 nm, 140 nm, 150 nm, or 160 nm. In some embodiments, an LNP has a diameter of less than about 100 nm. In some embodiments, an LNP has a diameter of less than about 90 nm. In some embodiments, an LNP has a diameter of less than about 80 nm. In some embodiments, an LNP has a diameter of about 60-100 nm. In some embodiments, an LNP has a diameter of about 75-80 nm. In some embodiments, an LNP has a diameter of about 100-150 nm.

[0656] In some embodiments, the lipid nanoparticle compositions of the present disclosure are described according to the respective molar ratios of the component lipids in the formulation. As a non-limiting example, the mol-% of the ionizable lipid may be from about 10 mol-% to about 80 mol-%. As a non-limiting example, the mol-% of the ionizable lipid may be from about 20 mol-% to about 70 mol-%. As a non-limiting example, the mol-% of the ionizable lipid may be from about 30 mol-% to about 60 mol-%. As a non-limiting example, the mol-% of the ionizable lipid may be from about 35 mol-% to about 55 mol-%. As a non-limiting example, the mol-% of the ionizable lipid may be from about 40 mol-% to about 50 mol-%.

[0657] In some embodiments, the mol-% of the phospholipid may be from about 1 mol-% to about 50 mol-%. In some embodiments, the mol-% of the phospholipid may be from about 2 mol-% to about 45 mol-%. In some embodiments, the mol-% of the phospholipid may be from about 3 mol-% to about 40 mol-%. In some embodiments, the mol-% of the phospholipid may be from about 4 mol-% to about 35 mol-%. In some embodiments, the mol-% of the phospholipid may be from about 5 mol-% to about 30 mol-%. In some embodiments, the mol-% of the phospholipid may be from about 10 mol-% to about 20 mol-%. In some embodiments, the mol-% of the phospholipid may be from about 5 mol-% to about 20 mol-%.

[0658] In some embodiments, the mol-% of the structural lipid may be from about 10 mol-% to about 80 mol-%. In some embodiments, the mol-% of the structural lipid may be from about 20 mol-% to about 70 mol-%. In some embodiments, the mol-% of the structural lipid may be from about 30 mol-% to about 60 mol-%. In some embodiments, the mol-% of the structural lipid may be from about 35 mol-% to about 55 mol-%. In some embodiments, the mol-% of the structural lipid may be from about 40 mol-% to about 50 mol-%.

[0659] In some embodiments, the mol-% of the PEG lipid may be from about 0.1 mol-% to about 10 mol-%. In some embodiments, the mol-% of the PEG lipid may be from about 0.2 mol-% to about 5 mol-%. In some embodiments, the mol-% of the PEG lipid may be from about 0.5 mol-% to about 3 mol-%. In some embodiments, the mol-% of the PEG lipid may be from about 1 mol-% to about 2 mol-%. In some embodiments, the mol-% of the PEG lipid may be about 1.5 mol-%. In some embodiments, the mol-% of the PEG lipid may be about 2.5 mol-%.

i. Ionizable Lipids

[0660] In some embodiments, an LNP disclosed herein comprises an ionizable lipid. In some embodiments, an LNP comprises two or more ionizable lipids.

[0661] Described below are a number of exemplary ionizable lipids of the present disclosure.

[0662] In some embodiments, an LNP of the present disclosure comprises an ionizable lipid disclosed in one of US 2019/0240354; US 2010/0130588; US 2021/0087135; WO 2021/204179; US 2021/0128488; US 2020/0121809; US 2017/0119904; US 2013/0108685; US 2013/0195920; US 2015/0005363; US 2014/0308304; US 2013/0053572; WO 2019/232095A1; WO 2021/077067; WO 2019/152557; US 2017/0210697; or WO 2019/089828A1, each of which is incorporated by reference herein in their entirety.

[0663] In some embodiments, an ionizable lipid has a dimethylamine or an ethanolamine head. In some embodiments, an ionizable lipid has an alkyl tail. In some embodiments, a tail has one or more ester linkages, which may enhance biodegradability. In some embodiments, a tail is branched, such as with 3 or more branches. In some embodiments, a branched tail may enhance endosomal escape. In some embodiments, an ionizable lipid has a pKa between 6 and 7, which may be measured, for example, by TNS assay.

[0664] In some embodiments, an ionizable lipid has a structure of any of the formulas disclosed below, and all formulas disclosed in a reference publication and patent application publication cited below. In some embodiments, an ionizable lipid comprises a head group of any structure or formula disclosed below. In some embodiments, an ionizable lipid comprises a bridging moiety of any structure or formula disclosed below. In some embodiments, an ionizable lipid comprises any tail group, or combination of tail groups disclosed below. The present disclosure contemplates all permutations and combinations of head group, bridging moiety and tail group, or tail groups, disclosed herein.

[0665] In some embodiments, a head, tail, or structure of an ionizable lipid is described in US patent application US20170210697A1.

[0666] In some embodiments, a compound has a structure according to formula 1:

[chemical structure]

[0667] wherein:
[0668] R¹ is selected from the group consisting of C5-30 alkyl, C5-20 alkenyl, —R*YR″, YR″, and —R″M′R′;
[0669] R² and R³ are independently selected from the group consisting of H, C1-14 alkyl, C2-14 alkenyl, —R*YR″, —YR″, and —R*OR″, or R² and R³, together with the atom to which they are attached, form a heterocycle or carbocycle;
[0670] R⁴ is selected from the group consisting of a C3-6 carbocycle, —(CH₂)nQ, —(CH2)nCHQR, —CHQR, CO(R)₂, and unsubstituted C1-6 alkyl, where Q is selected from a carbocycle, heterocycle, —OR, —O(CH₂)nN(R)₂, —C(O)OR, —OC(O)R, —CX₃, —CX₂H, —CXH₂, —CN, N(R)₂, —C(O)N(R)₂, —N(R)C(O)R, —N(R)S(O)2R, —N(R)C(O)N(R)2, —N(R)C(S)N(R)₂, —N(R)R⁸, —O(CH₂)ₙOR, —N(R)C(═NR⁹)N(R)₂, —N(R)C(═CHR⁹)N(R)₂, —OC(O)N(R)₂, —N(R)C(O)OR, —N(OR)C(O)R, —N(OR)S(O)₂R, —N(OR)C(O)OR, —N(OR)C(O)N(R)₂, —N(OR)C(S)N(R)₂—N(OR)C(—NR)N(R)—N(OR)C(═CHR⁹)N(R)₂, —C(═NR⁹)N(R)₂, —C(═NR⁹)R, —C(O)N(R)OR, and —C(R)N(R)₂, C(O)OR, and each n is independently selected from 1, 2, 3, 4, and 5 or a head group disclosed in Table 1;
[0671] each R⁵ is independently selected from the group consisting of C1-3 alkyl, C2-3 alkenyl, and H;
[0672] each R⁶ is independently selected from the group consisting of C1-3 alkyl, C2-3 alkenyl, and H;
[0673] M and M′ are independently selected from —C(O)O—, —OC(O)—, —C(O)N(R′)—, —N(R′)C(O)—, —C(O)—, —C(S)—, —C(S)S—, —SC(S)—, —CH(OH)—, —P(O)(OR′)O—, —S(O)—, —S—S—, an aryl group, and a heteroaryl group;
[0674] R⁷ is selected from the group consisting of C1-3alkyl, C2-3 alkenyl, and H;
[0675] R⁸ is selected from the group consisting of C3-6 carbocycle and heterocycle;
[0676] R⁹ is selected from the group consisting of H. CN, NO₂, C1-6 alkyl, —OR, —S(O)2R, —S(O)₂N(R)₂, C2-6 alkenyl, C3-6 carbocycle and heterocycle;
[0677] each R is independently selected from the group consisting of C1-3 alkyl, C2-3 alkenyl, and H;
[0678] each R′ is independently selected from the group consisting of C1-18 alkyl, C2-18 alkenyl, —R*YR″, —YR″, and H;
[0679] each R″ is independently selected from the group consisting of C3-14 alkyl, C3-14 alkenyl, and H;
[0680] each R* is independently selected from the group consisting of C1-12 alkyl and C2-12 alkenyl:
[0681] each Y is independently a C3-6 carbocycle;
[0682] each X is independently selected from the group consisting of F, Cl, Br, and I;
[0683] each Q is is —OH, —NHC(S)N(R)₂, —NHC(O)N(R)₂, —N(R)C(O)R, —N(R)S(O)₂R, —N(R)R⁸, —NHC(═NR⁹)N(R)₂, —NHC(═CHR⁹)N(R)₂, —OC(O)N(R)₂, —N(R)C(O)OR, heteroaryl or heterocycloalkyl; and
[0684] m is selected from 5, 6, 7, 8, 9, 10, 11, 12, and 13:
[0685] and wherein when R⁴ is —(CH₂)ₙQ, —(CH₂)ₙCHQR, —CHQR, or —CQ(R)₂, then (i) Q is not —N(R), when n is 1, 2, 3, 4 or 5, or (ii) Q is not 5, 6, or 7-membered heterocycloalkyl when n is 1 or 2.

[0686] In some embodiments, R⁴ is in Table 1.

[0687] In some embodiments, R⁴ in formula 1 is selected from head groups 1-47.

TABLE 1
Ionizable lipid head groups

| Head | |
|---|---|
| number | Structure |
| 1 | [chemical structure] |
| 2 | [chemical structure] |
| 3 | [chemical structure] |
| 4 | [chemical structure] |
| 5 | [chemical structure] |
| 6 | [chemical structure] |
| 7 | [chemical structure] |
| 8 | [chemical structure] |
| 9 | [chemical structure] |
| 10 | [chemical structure] |
| 11 | [chemical structure] |
| 12 | [chemical structure] |
| 13 | [chemical structure] |
| 04 | [chemical structure] |
| 15 | [chemical structure] |
| 16 | [chemical structure] |
| 17 | [chemical structure] |
| 18 | [chemical structure] |
| 19 | [chemical structure] |
| 20 | [chemical structure] |
| 21 | [chemical structure] |
| 22 | [chemical structure] |
| 23 | [chemical structure] |
| 24 | [chemical structure] |
| 25 | [chemical structure] |
| 26 | [chemical structure] |
| 27 | [chemical structure] |
| 28 | [chemical structure] |
| 29 | [chemical structure] |
| 30 | [chemical structure] |
| 31 | [chemical structure] |
| 32 | [chemical structure] |
| 33 | [chemical structure] |
| 34 | [chemical structure] |
| 35 | [chemical structure] |
| 36 | [chemical structure] |
| 37 | [chemical structure] |
| 38 | [chemical structure] |
| 39 | [chemical structure] |
| 40 | [chemical structure] |
| 41 | [chemical structure] |
| 42 | [chemical structure] |
| 43 | [chemical structure] |
| 44 | [chemical structure] |
| 45 | [chemical structure] |
| 46 | [chemical structure] |
| 47 | [chemical structure] |
| 48 | [chemical structure] |
| 49 | [chemical structure] |
| 50 | [chemical structure] |
| 51 | [chemical structure] |
| 52 | [chemical structure] |
| 53 | [chemical structure] |
| 54 | [chemical structure] |
| 55 | [chemical structure] |
| 56 | [chemical structure] |
| 57 | [chemical structure] |
| 58 | [chemical structure] |
| 59 | [chemical structure] |
| 60 | [chemical structure] |
| 61 | [chemical structure] |
| 62 | [chemical structure] |
| 63 | [chemical structure] |
| 64 | [chemical structure] |
| 65 | [chemical structure] |
| 66 | [chemical structure] |
| 67 | [chemical structure] |
| 68 | [chemical structure] |

[0688] In some embodiments, a subset of the compounds of formula 1 are also described by formula 1b:

[chemical structure]

wherein 1 is selected from 1, 2, 3, 4, and 5; M¹ is a bond or M′; R⁴ is unsubstituted C1-3 alkyl, or —(CH2)nQ, in which n is 2, 3, or 4, and Q is —OH, —NHC(S)N(R)₂, —NHC(O)N(R)₂, —N(R)C(O)R, —N(R)S(O)₂R, —N(R)R⁸, —NHC(═NR⁹)N(R)₂, —NHC(═CHR⁹)N(R)₂, —OC(O)N(R)₂, —N(R)C(O)OR, heteroaryl or heterocycloalkyl; M and M′ are independently selected from —C(O)O—, —OC(O)—, —C(O)N(R′)—, —P(O)(OR′)O—, —S—S—, an aryl group, and a heteroaryl group; and R² and R3 are independently selected from the group consisting of H, C1-14 alkyl, and C2-14 alkenyl.

[0689] In some embodiments, a head, tail, or structure of an ionizable lipid is described in international patent application PCT/US2018/058555.

[0690] In some embodiments, an ionizable lipid has a structure according to formula 2:

[chemical structure]

[0691] wherein:
[0692] one of L¹ or L² is —O(C═O)—, —(C═O)O—, —C(═O)—, —O—, —S(O)x-, —S—S—, —C(═O)S—, SC(═O)—, —NRaC(═O)—, —C(═O)NRa—, NRaC(═O)NRa—, —OC(═O)NRa- or —NRaC(═O)O—, and the other of L¹ or L² is —O(C═O)—, —(C═O)O—, —C(═O)—, —O—, —S(O)x-, —S—S—, —C(═O)S—, SC(═O)—, —NRaC(═O)—, —C(═O)NRa—, NRaC(═O)NRa—, —OC(═O)NRa- or —NRaC(═O)O— or a direct bond;
[0693] Ra is H or C1-C12 alkyl;
[0694] R^{1a} and R^{1b} are, at each occurrence, independently either (a) H or C1-C12 alkyl, or (b) R^{1a} is H or C1-C12 alkyl, and R^{1b} together with the carbon atom to which it is bound is taken together with an adjacent R^{1b} and the carbon atom to which it is bound to form a carbon-carbon double bond;
[0695] R^{2a} and R^{2b} are, at each occurrence, independently either (a) H or C1-C12 alkyl, or (b) R^{2a} is H or C1-C12 alkyl, and R^{2b} together with the carbon atom to which it is bound is taken together with an adjacent R^{2b} and the carbon atom to which it is bound to form a carbon-carbon double bond;
[0696] R^{3a} and R^{3b} are, at each occurrence, independently either (a) H or C1-C12 alkyl, or (b) R^{3a} is H or C1-C12 alkyl, and R^{3b} together with the carbon atom to which it is bound is taken together with an adjacent R^{3b} and the carbon atom to which it is bound to form a carbon-carbon double bond;
[0697] R^{4a} and R^{4b} are, at each occurrence, independently either (a) H or C1-C12 alkyl, or (b) R^{4a} is H or C1-C12 alkyl, and R^{4b} together with the carbon atom to which it is bound is taken together with an adjacent R^{4b} and the carbon atom to which it is bound to form a carbon-carbon double bond;
[0698] R⁵ and R⁶ are each independently methyl or cycloalkyl;
[0699] R⁷ is, at each occurrence, independently H or C1-C12 alkyl;
[0700] R⁸ and R⁹ are each independently unsubstituted C1-C12 alkyl; or R⁸ and R⁹, together with the nitrogen atom to which they are attached, form a 5, 6 or 7-membered heterocyclic ring comprising one nitrogen atom;
[0701] a and d are each independently an integer from 0 to 24;
[0702] b and c are each independently an integer from 1 to 24;
[0703] e is 1 or 2; and
[0704] x is 0, 1 or 2.

[0705] In some embodiments, an ionizable lipid has a structure according to formula 3:

[chemical structure]

[0706] wherein:
[0707] one of L¹ or L² is —O(C═O)—, —(C═O)O—, —C(═O)—, —O—, —S(O)x-, —S—S—, —C(═O)S—, SC(═O)—, —NRaC(═O)—, —C(═O)NRa—, NRaC(═O)NRa—, —OC(═O)NRa- or —NRaC(═O)O—, and the other of L¹ or L² is —O(C═O)—, —(C═O)O—, —C(═O)—, —O—, —S(O)x-, —S—S—, —C(═O)S—, SC(═O)—, —NRaC(═O)—, —C(═O)NRa—, NRaC(═O)NRa—, —OC(═O)NRa- or —NRaC(═O)O— or a direct bond;
[0708] G1 is C1-C2 alkylene, —(C═O)—, —O(C═O)—, —SC(═O)—, —NRaC(═O)— or a direct bond:
[0709] G2 is —C(═O)—, —(C═O)O—, —C(═O)S—, —C(═O)NRa- or a direct bond;
[0710] G3 is C1-C6 alkylene;
[0711] Ra is H or C1-C12 alkyl;
[0712] R^{1a} and R^{1b} are, at each occurrence, independently either: (a) H or C1-C12 alkyl; or (b) R^{1a} is H or C1-C12 alkyl, and R^{1b} together with the carbon atom to which it is bound is taken together with an adjacent R^{1b} and the carbon atom to which it is bound to form a carbon-carbon double bond;
[0713] R^{2a} and R^{2b} are, at each occurrence, independently either: (a) H or C1-C12 alkyl; or (b) R^{2a} is H or C1-C12 alkyl, and R^{2b} together with the carbon atom to which it is bound is taken together with an adjacent R^{2b} and the carbon atom to which it is bound to form a carbon-carbon double bond;
[0714] R^{3a} and R^{3b} are, at each occurrence, independently either (a): H or C1-C12 alkyl; or (b) R^{3a} is H or C1-C12 alkyl, and R^{3b} together with the carbon atom to which it is bound is taken together with an adjacent R^{3b} and the carbon atom to which it is bound to form a carbon-carbon double bond;
[0715] R^{4a} and R^{4b} are, at each occurrence, independently either: (a) H or C1-C12 alkyl; or (b) R^{4a} is H or C1-C12 alkyl, and R^{4b} together with the carbon atom to which it is bound is taken together with an adjacent R^{4b} and the carbon atom to which it is bound to form a carbon-carbon double bond;
[0716] R⁵ and R⁶ are each independently H or methyl;
[0717] R⁷ is C4-C20 alkyl;
[0718] R⁸ and R⁹ are each independently C1-C12 alkyl; or R⁸ and R⁹, together with the nitrogen atom to which they are attached, form a 5, 6 or 7-membered heterocyclic ring;
[0719] a, b, c and d are each independently an integer from 1 to 24; and x is 0, 1 or 2.

[0720] In some embodiments, an ionizable lipid has a structure according to formula 4:

[chemical structure]

[0721] wherein:
[0722] one of L¹ or L² is —O(C═O)—, —(C═O)O—, —C(═O)—, —O—, —S(O)x-, —S—S—, —C(═O)S—, SC(═O)—, —NRaC(═O)—, —C(═O)NRa—, NRaC(═O)NRa—, —OC(═O)NRa- or —NRaC(═O)O—, and the other of L¹ or L² is —O(C═O)—, —(C═O)O—, —C(═O)—, —O—, —S(O)x-, —S—S—, —C(═O)S—, SC(═O)—, —NRaC(═O)—, —C(═O)NRa—, NRaC(═O)NRa—, —OC(═O)NRa- or —NRaC(═O)O— or a direct bond;
[0723] G¹ and G² are each independently unsubstituted C1-C12 alkylene or C1-C12 alkenylene;
[0724] G³ is C1-C24 alkylene, C1-C24 alkenylene, C3-C8 cycloalkylene, C3-C8 cycloalkenylene;
[0725] Ra is H or C1-C12 alkyl;
[0726] R¹ and R² are each independently C6-C24 alkyl or C6-C24 alkenyl;
[0727] R³ is H, OR5, CN, —C(═O)OR4, —OC(═O)R⁴ or —NR5C(═O)R4;
[0728] R⁴ is C1-C12 alkyl;
[0729] R⁵ is H or C1-C6 alkyl; and
[0730] x is 0, 1 or 2.

[0731] In some embodiments, an ionizable lipid has a structure according to formula 5:

[chemical structure]

[0732] wherein:
[0733] one of G¹ or G² is, at each occurrence, —O(C═O)—, —(C═O)O—, —C(═O)—, —O—, —S(O)y, —S—S—, —C(═O)S—, SC(═O)—, —N(Ra)C(═O)—, —C(═O)N(Ra)-, —N(Ra)C(═O)N(Ra)-, —OC(═O)N(Ra)- or —N(Ra)C(═O)O—, and the other of G1 or G2 is, at each occurrence, —O(C═O)—, —(C═O)O—, —C(═O)—, —O—, —S(O)y, —S—S—, —C(═O)S—, —SC(═O)—, —N(Ra)C(═O)—, —C(═O)N(Ra)-, —N(Ra)C(═O)N(Ra)-, —OC(═O)N(Ra)- or —N(Ra)C(═O)O— or a direct bond;
[0734] L is, at each occurrence, ˜O(C═O)—, wherein ˜ represents a covalent bond to X;
[0735] X is CRa;
[0736] Z is alkyl, cycloalkyl or a monovalent moiety comprising at least one polar functional group when n is 1; or Z is alkylene, cycloalkylene or a polyvalent moiety comprising at least one polar functional group when n is greater than 1;
[0737] Ra is, at each occurrence, independently H, C1-C12 alkyl, C1-C12 hydroxylalkyl, C1-C12 aminoalkyl, C1-C12 alkylaminylalkyl, C1-C12 alkoxyalkyl, C1-C12 alkoxycarbonyl, C1-C12 alkylcarbonyloxy, C1-C12 alkylcarbonyloxyalkyl or C1-C12 alkylcarbonyl;
[0738] R is, at each occurrence, independently either: (a) H or C1-C12 alkyl; or (b) R together with the carbon atom to which it is bound is taken together with an adjacent R and the carbon atom to which it is bound to form a carbon-carbon double bond;
[0739] R¹ and R² have, at each occurrence, the following structure, respectively:

[chemical structure]

[0740] a¹ and a² are, at each occurrence, independently an integer from 3 to 12;
[0741] b¹ and b² are, at each occurrence, independently 0 or 1;
[0742] c¹ and c² are, at each occurrence, independently an integer from 5 to 10;
[0743] d¹ and d² are, at each occurrence, independently an integer from 5 to 10;
[0744] y is, at each occurrence, independently an integer from 0 to 2; and
[0745] n is an integer from 1 to 6,
[0746] wherein each alkyl, alkylene, hydroxylalkyl, aminoalkyl, alkylaminylalkyl, alkoxyalkyl, alkoxycarbonyl, alkylcarbonyloxy, alkylcarbonyloxyalkyl and alkylcarbonyl is optionally substituted with one or more substituent.

[0747] In some embodiments, an ionizable lipid has a structure according to formula 6:

[chemical structure]

[0748] wherein:
[0749] one of G¹ or G² is, at each occurrence, —O(C═O)—, —(C═O)O—, —C(═O)—, —O—, —S(O)y, —S—S—, —C(═O)S—, SC(═O)—, —N(Ra)C(═O)—, —C(═O)N(Ra)-, —N(Ra)C(═O)N(Ra)-, —OC(═O)N(Ra)- or —N(Ra)C(═O)O—, and the other of G1 or G2 is, at each occurrence, —O(C═O)—, —(C═O)O—, —C(═O)—, —O—, —S(O)y-, —S—S—, —C(═O)S—, —SC(═O)—, —N(Ra)C(═O)—, —C(═O)N(Ra)-, —N(Ra)C(═O)N(Ra)-, —OC(═O)N(Ra)- or —N(Ra)C(═O)O— or a direct bond;
[0750] L is, at each occurrence, ˜O(C═O)—, wherein ˜ represents a covalent bond to X;
[0751] X is CRa;
[0752] Z is alkyl, cycloalkyl or a monovalent moiety comprising at least one polar functional group when n is 1; or Z is alkylene, cycloalkylene or a polyvalent moiety comprising at least one polar functional group when n is greater than 1;
[0753] Ra is, at each occurrence, independently H, C1-C12 alkyl, C1-C12 hydroxylalkyl, C1-C12 aminoalkyl, C1-C12 alkylaminylalkyl, C1-C12 alkoxyalkyl, C1-C12 alkoxycarbonyl, C1-C12 alkylcarbonyloxy, C1-C12 alkylcarbonyloxyalkyl or C1-C12 alkylcarbonyl;
[0754] R is, at each occurrence, independently either: (a) H or C1-C12 alkyl; or (b) R together with the carbon atom to which it is bound is taken together with an adjacent R and the carbon atom to which it is bound to form a carbon-carbon double bond;
[0755] R¹ and R² have at each occurrence the following structure, respectively:

[chemical structure]

[0756] R′ is, at each occurrence, independently H or C1-C12 alkyl;
[0757] a¹ and a² are, at each occurrence, independently an integer from 3 to 12;
[0758] b¹ and b² are, at each occurrence, independently 0 or 1;
[0759] c¹ and c² are, at each occurrence, independently an integer from 2 to 12;
[0760] d¹ and d² are, at each occurrence, independently an integer from 2 to 12;
[0761] y is, at each occurrence, independently an integer from 0 to 2; and
[0762] n is an integer from 1 to 6,
[0763] wherein a¹, a², c¹, c², d¹ and d² are selected such that the sum of a¹+c¹+d¹ is an integer from 18 to 30, and the sum of a²+c²+d² is an integer from 18 to 30, and wherein each alkyl, alkylene, hydroxylalkyl, aminoalkyl, alkylaminylalkyl, alkoxyalkyl, alkoxycarbonyl, alkylcarbonyloxy, alkylcarbonyloxyalkyl and alkylcarbonyl is optionally substituted with one or more substituent.

[0764] In certain embodiments of Formula (V), G¹ and G² are each independently —O(C═O)— or —(C═O)O—.

[0765] In some embodiments, an ionizable lipid has a disulfide tail.

[0766] In some embodiments, an ionizable lipid includes short peptides of 12-15 mer length as head groups.

[0767] In some embodiments, the head of an ionizable lipid comprises the structure of Vitamin A, D, E, or K as described in the published Patent Application WO2019232095A1, which is incorporated by herein by reference in its entirety.

[0768] In some embodiments, a lipid is described in international patent applications WO2021077067, or WO2019152557, each of which is incorporated herein by reference in its entirety.

[0769] In some embodiments, an LNP described herein comprises a lipid, e.g., an ionizable lipid, disclosed in US 2019/0240354, which is incorporated herein by reference in its entirety.

[0770] In some embodiments, the lipids disclosed in US 2019/0240354 are of Formula I:

[chemical structure]

[0771] or salts thereof, wherein:
[0772] R¹ and R² are either the same or different and are independently hydrogen (H) or an optionally substituted C₁-C₆ alkyl, C₂-C₆ alkenyl, or C₂-C₆ alkynyl, or R¹ and R² may join to form an optionally substituted heterocyclic ring of 4 to 6 carbon atoms and 1 or 2 heteroatoms selected from the group consisting of nitrogen (N), oxygen (O), and mixtures thereof;
[0773] R³ is either absent or is hydrogen (H) or a C₁-C₆ alkyl to provide a quaternary amine; R⁴ and R⁵ are either the same or different and are independently an optionally substituted C₁₀-C₂₄ alkyl, C₁₀-C₂₄ alkenyl, C₁₀-C₂₄ alkynyl, or C₁₀-C₂₄ acyl, wherein at least one of R⁴ and R⁵ comprises at least two sites of unsaturation; and
[0774] n is 0, 1, 2, 3, or 4.

[0775] In some embodiments, the lipids disclosed in US 2019/0240354 are of Formula II:

[chemical structure]

[0776] wherein R¹ and R² are either the same or different and are independently an optionally substituted C₁₂-C₂₄ alkyl, C₁₂-C₂₄ alkenyl, C₁₂-C₂₄ alkynyl, or C₁₂-C₂₄ acyl; R³ and R⁴ are either the same or different and are independently an optionally substituted C₁-C₆ alkyl, C₂-C₆ alkenyl, or C₂-C₆ alkynyl, or R³ and R⁴ may join to form an optionally substituted heterocyclic ring of 4 to 6 carbon atoms and 1 or 2 heteroatoms chosen from nitrogen and oxygen; R⁵ is either absent or is hydrogen (H) or a C₁-C₆ alkyl to provide a quaternary amine; m, n, and p are either the same or different and are independently either 0, 1, or 2, with the proviso that m, n, and p are not simultaneously 0; q is 0, 1, 2, 3, or 4; and Y and Z are either the same or different and are independently 0, S, or NH. In some embodiments, q is 2.

[0777] In some embodiments, the cationic lipid of Formula II is 2,2-dilinoleyl-4-(2-dimethylaminoethyl)-[1,3]-dioxolane, 2,2-dilinoleyl-4-(3-dimethylaminopropyl)-[1,3]-dioxolane, 2,2-dilinoleyl-4-(4-dimethylaminobutyl)-[1,3]-dioxolane, 2,2-dilinoleyl-5-dimethylaminomethyl-[1,3]-dioxane, 2,2-dilinoleyl-4-N-methylpepiazino-[1,3]-dioxolane, 2,2-dilinoleyl-4-dimethylaminomethyl-[1,3]-dioxolane, 2,2-dioleoyl-4-dimethylaminomethyl-[1,3]-dioxolane, 2,2-distearoyl-4-dimethylaminomethyl-[1,3]-dioxolane, 2,2-dilinoleyl-4-N-morpholino-[1,3]-dioxolane, 2,2-Dilinoleyl-4-trimethylamino-[1,3]-dioxolane chloride, 2,2-dilinoleyl-4,5-bis(dimethylaminomethyl)-[1,3]-dioxolane, 2,2-dilinoleyl-4-methylpiperzine-[1,3]-dioxolane, or mixtures thereof. In some embodiments, the cationic lipid of Formula II is 2,2-dilinoleyl-4-(2-dimethylaminoethyl)-[1,3]-dioxolane.

[0778] In some embodiments, the lipids disclosed in US 2019/0240354 are of Formula III:

[chemical structure]

or salts thereof, wherein: R¹ and R² are either the same or different and are independently an optionally substituted C₁-C₆ alkyl, C₂-C₆ alkenyl, or C₂-C₆ alkynyl, or R¹ and R² may join to form an optionally substituted heterocyclic ring of 4 to 6 carbon atoms and 1 or 2 heteroatoms selected from the group consisting of nitrogen (N), oxygen (O), and mixtures thereof; R³ is either absent or is hydrogen (H) or a C₁-C₆ alkyl to provide a quaternary amine; R⁴ and R⁵ are either absent or present and when present are either the same or different and are independently an optionally substituted C₁-C₁₀ alkyl or C₂-C₁₀ alkenyl; and n is 0, 1, 2, 3, or 4.

[0779] In some embodiments, the lipids disclosed in US 2019/0240354 are of Formula C:

X-A-Y—Z¹; (Formula C)
[0780] or salts thereof, wherein:
[0781] X is —N(H)R or —NR₂;
[0782] A is absent, C₁ to C₆ alkyl, C₂ to C₆ alkenyl, or C₂ to C₆ alkynyl, which C₁ to C₆ alkyl, C₂ to C₆ alkenyl, and C₂ to C₆ alkynyl is optionally substituted with one or more groups independently selected from oxo, halogen, heterocycle, —CN, —OR^{x}, —NR^{x}R^{y}, —NR^{x}C(═O)R^{y}, —NR^{x}SO₂R^{y}, —C(═O)R^{x}, —C(═O)OR^{x}, —C(═O)NR^{x}R^{y}, —SOₙR^{x}, and —SOₙNR^{x}R^{y}, wherein n is 0, 1, or 2, and R^{x} and R^{y} are each independently hydrogen, alkyl, or heterocycle, wherein each alkyl and heterocycle of R^{x} and R^{y} may be further substituted with one or more groups independently selected from oxo, halogen, —OH, —CN, alkyl, —OR^{x}, heterocycle, —NR^{x′}R^{y′}, —NR^{x′}C(═O)R^{y′}, —NR^{x′}SO₂R^{y′}, —C(═O)R^{x′}, —C(═O)OR^{x′}, —C(═O)NR^{x′}R^{y′}, —SO_{n′}R^{x′}, and —SO_{n′}NR^{x′}R^{y′}, wherein n′ is 0, 1, or 2, and R^{x′} and R^{y′} are each independently hydrogen, alkyl, or heterocycle;
[0783] Y is selected from the group consisting of absent, —C(═O)—, —O—, —OC(═O)—, —C(═O)O—, —N(R^{b})C(═O)—, —C(═O)N(R^{b})—, —N(R^{b})C(═O)O—, and —OC(═O)N(R^{b})—;
[0784] Z¹ is a C₁ to C₆ alkyl that is substituted with three or four R^{x} groups, wherein each R^{x} is independently selected from C₆ to C₁₁ alkyl, C₆ to C₁₁ alkenyl, and C₆ to C₁₁ alkynyl, which C₆ to C₁₁ alkyl, C₆ to C₁₁ alkenyl, and C₆ to C₁₁ alkynyl is optionally substituted with one or more groups independently selected from oxo, halogen, heterocycle, —CN, —OR^{x}, —NR^{x}R^{y}, —NR^{x}C(═O)R^{y}, —NR^{x}SO₂R^{y}, —C(═O)R^{x}, —C(═O)OR^{x}, —C(═O)NR^{x}R^{y}, —SOₙR^{x}, and —SOₙNR^{x}R^{y}, wherein n is 0, 1, or 2, and R^{x} and R^{y} are each independently hydrogen, alkyl, or heterocycle, wherein any alkyl and heterocycle of R^{x} and R^{y} may be further substituted with one or more groups independently selected from oxo, halogen, —OH, —CN, alkyl, —OR^{x′}, heterocycle, —NR^{x′}R^{y′}, —NR^{x′}C(═O)R^{y′}, —NR^{x′}SO₂R^{y′}, —C(═O)R^{x′}, —C(═O)OR^{x′}, —C(═O)NR^{x′}R^{y′}, —SO_{n′}R^{x′}, and —SO_{n′}NR^{x′}R^{y′}, wherein n′ is 0, 1, or 2, and R^{x′} and R^{y′} are each independently hydrogen, alkyl, or heterocycle;
[0785] each R is independently alkyl, alkenyl, or alkynyl, that is optionally substituted with one or more groups independently selected from oxo, halogen, heterocycle, —CN, —OR^{x}, —NR^{x}R^{y}, —NR^{x}C(═O)R^{y}, —NR^{x}SO₂R^{y}, —C(═O)R^{x}, —C(═O)OR^{x}, —C(═O)NR^{x}R^{y}, —SOₙR^{x}, and —SOₙNR^{x}R^{y}, wherein n is 0, 1, or 2, and R^{x} and R^{y} are each independently hydrogen, alkyl, or heterocycle, wherein any alkyl and heterocycle of R^{x} and R^{y} may be further substituted with one or more groups independently selected from oxo, halogen, —OH, —CN, alkyl, —OR^{x′}, heterocycle, —NR^{x′}R^{y′}, —NR^{x′}C(═O)R^{y′}, —NR^{x′}SO₂R^{y′}, —C(═O)R^{x′}, —C(═O)OR^{x′}, —C(═O)NR^{x′}R^{y′}, —SO_{n′}R^{x′}, and —SO_{n′}NR^{x′}R^{y′}, wherein n′ is 0, 1, or 2, and R^{x′}, and R^{y′} are each independently hydrogen, alkyl, or heterocycle; and
[0786] each R is H or C₁ to C₆alkyl.

[0787] In some embodiments, an LNP described herein comprises a lipid, e.g., an ionizable lipid, disclosed in US 2010/0130588, which is incorporated herein by reference in its entirety.

[0788] In some embodiments, the lipids disclosed in US 2010/0130588 are of Formula I:

[chemical structure]

wherein R¹ and R² are independently selected and are H or C₁-C₃ alkyls, R³ and R⁴ are independently selected and are alkyl groups having from about 10 to about 20 carbon atoms, and at least one of R³ and R⁴ comprises at least two sites of unsaturation. In some embodiments, R³ and R⁴ are both the same, i.e., R³ and R⁴ are both linoleyl (C₁₈), etc. In some embodiments, R³ and R⁴ are different, i.e., R³ is tetradectrienyl (C₁₄) and R⁴ is linoleyl (C₁₈).

[0789] In some embodiments, the lipid of Formula I is 1,2-dilinoleyloxy-N,N-dimethylaminopropane (DLinDMA) or 1,2-dilinolenyloxy-N,N-dimethylaminopropane (DLenDMA).

[0790] In some embodiments, the lipids disclosed in US 2010/0130588 are of Formula II:

[chemical structure]

wherein R¹ and R² are independently selected and are H or C₁-C₃ alkyls, R³ and R⁴ are independently selected and are alkyl groups having from about 10 to about 20 carbon atoms, and at least one of R³ and R⁴ comprises at least two sites of unsaturation.

[0791] In some embodiments, an LNP described herein comprises a lipid, e.g., an ionizable lipid, disclosed in US 2021/0087135, which is incorporated herein by reference in its entirety.

[0792] In some embodiments, the lipids disclosed in US 2021/0087135 are of Formula (A):

[chemical structure]

[0793] or its N-oxide, or a salt or isomer thereof,
[0794] wherein R^{′a} is R^{′branched} or R^{cyclic}; wherein
[0795] R^{′branched} is:

[chemical structure]

[0796] R^{′cyclic} is:

[chemical structure]

[0797] wherein:

[chemical structure]

[0798] denotes a point of attachment;
[0799] wherein R^{aα} is H, and R^{aβ}, R^{aγ}, and R^{aδ} are each independently selected from the group consisting of H, C₂₋₁₂ alkyl, and C₂₋₁₂ alkenyl, wherein at least one of R^{aβ}, R^{aγ}, and R^{aδ} is selected from the group consisting of C₂₋₁₂ alkyl and C₂₋₁₂ alkenyl;
[0800] R² and R³ are each C₁₋₁₄ alkyl;
[0801] R⁴ is selected from the group consisting of —(CH₂)₂OH, —(CH₂)₃OH, —(CH₂)₄OH, —(CH₂)₅OH and

[chemical structure]

[0802] wherein:

[chemical structure]

[0803] denotes a point of attachment;
[0804] R¹⁰ is N(R)2; each R is independently selected from the group consisting of C₁₋₆ alkyl, C₂₋₃ alkenyl, and H; and
[0805] n2 is selected from the group consisting of 1, 2, 3, 4, 5, 6, 7, 8, 9, and 10;
[0806] each R⁵ is independently selected from the group consisting of OH, C₁₋₃ alkyl, C₂₋₃ alkenyl, and H;
[0807] each R⁶ is independently selected from the group consisting of OH, C₁₋₃ alkyl, C₂₋₃ alkenyl, and H;
[0808] R⁷ is H;
[0809] M and M′ are each independently selected from the group consisting of —C(O)O— and —OC(O)—;
[0810] R′ is a C₁₋₁₂ alkyl or C₂₋₁₂ alkenyl;
[0811] Y^{a} is a C₃₋₆ carbocycle;
[0812] R*^{″a} is selected from the group consisting of C₁₋₁₅ alkyl and C₂₋₁₅ alkenyl;
[0813] l is selected from the group consisting of 1, 2, 3, 4, and 5;
[0814] s is 2 or 3; and
[0815] m is selected from the group consisting of 5, 6, 7, 8, 9, 10, 11, 12, and 13.

[0816] In some embodiments, an LNP described herein comprises a lipid, e.g., an ionizable lipid, disclosed in US 2021/0128488, which is incorporated herein by reference in its entirety

[0817] In some embodiments, the lipids disclosed in US 2021/0128488 are of structure (I):

[chemical structure]

[0818] or a pharmaceutically acceptable salt, prodrug or stereoisomer thereof, wherein:
[0819] L¹ is —O(C═O)R′, —(C═O)OR¹, —C(═O)R¹, —OR¹, —S(O)ₓR¹, —S—SR¹, —C(═O)SR′, —SC(═O)R′, —NR^{a}C(═O)R¹, —C(═O)NR^{b}R^{c}, —NR^{a}C(═O)NR^{b}R^{c}, —OC(═O)NR^{b}R^{c} or —NR^{a}C(═O)OR¹;
[0820] L² is —O(C═O)R², —(C═O)OR², —C(═O)R², —OR², —S(O)ₓR², —S—SR², —C(═O)SR², —SC(═O)R², —NR_{d}C(═O)R², —C(═O)NR^{e}R^{f}, —NR^{d}C(═O)NR^{e}R^{f}, —OC(═O)NR^{e}R^{f}; —NR_{d}C(═O)OR² or a direct bond to R²;
[0821] G¹ and G² are each independently C₂-C₁₂ alkylene or C₂-C₁₂ alkenylene;
[0822] G³ is C₁-C₂₄ alkylene, C₂-C₂₄ alkenylene, C₃-C₈ cycloalkylene or C₃-C₈ cycloalkenylene;
[0823] R^{a}, R^{b}, R^{d} and R^{e} are each independently H or C₁-C₁₂ alkyl or C₁-C₁₂ alkenyl;
[0824] R^{c} and R^{f} are each independently C₁-C₁₂alkyl or C₂-C₁₂ alkenyl;
[0825] R¹ and R² are each independently branched C₆-C₂₄ alkyl or branched C₆-C₂₄ alkenyl;
[0826] R³ is —N(R⁴)R⁵;
[0827] R⁴ is C₁-C₁₂alkyl;
[0828] R⁵ is substituted C₁-C₁₂ alkyl; and
[0829] x is 0, 1 or 2, and wherein each alkyl, alkenyl, alkylene, alkenylene, cycloalkylene, cycloalkenylene, aryl and aralkyl is independently substituted or unsubstituted unless otherwise specified.

[0830] In some embodiments, an LNP described herein comprises a lipid, e.g., an ionizable lipid, disclosed in US 2020/0121809, which is incorporated herein by reference in its entirety.

[0831] In some embodiments the lipids disclosed in US 2020/0121809 have a structure of Formula II:

[chemical structure]

[0832] or a pharmaceutically acceptable salt, tautomer, prodrug or stereoisomer thereof, wherein:
[0833] one of L or L² is —O(C═O)—, —(C═O)O—, —C(═O)—, —O—, —S(O)ₓ—, —S—S—, —C(═O)S—, SC(═O)—, —NR^{a}C(═O)—, —C(═O)NR^{a}—, NR^{a}C(═O)NR^{a}—, —OC(═O)NR^{a}— or —NR^{a}C(═O)O—, and the other of L¹ or L² is —O(C═O)—, —(C═O)O—, —C(═O)—, —O—, —S(O)ₓ—, —S—S—, —C(═O)S—, SC(═O)—, —NR^{a}C(═O)—, —C(═O)NR^{a}—, NR^{a}C(═O)NR^{a}—, —OC(═O)NR^{a}— or —NR^{a}C(═O)O— or a direct bond;
[0834] G¹ is C₁-C₂ alkylene, —(C═O)—, —O(C═O)—, —SC(═O)—, —NR^{a}C(═O)— or a direct bond;
[0835] G² is —C(═O)—, —(C═O)O—, —C(═O)S—, —C(═O)NR^{a}— or a direct bond;
[0836] G³ is C₁-C₆ alkylene;
[0837] R^{a} is H or C₁-C₁₂ alkyl;
[0838] R^{1a} and R^{1b} are, at each occurrence, independently either: (a) H or C₁-C₁₂ alkyl; or (b) R^{1a} is H or C₁-C₁₂ alkyl, and R^{1b} together with the carbon atom to which it is bound is taken together with an adjacent R^{1b} and the carbon atom to which it is bound to form a carbon-carbon double bond;
[0839] R^{2a} and R^{2b} are, at each occurrence, independently either: (a) H or C₁-C₁₂ alkyl; or (b) R^{2a} is H or C₁-C₁₂ alkyl, and R^{2b} together with the carbon atom to which it is bound is taken together with an adjacent R^{2b} and the carbon atom to which it is bound to form a carbon-carbon double bond;
[0840] R^{3a} and R^{3b} are, at each occurrence, independently either (a): H or C₁-C₁₂ alkyl; or (b) R^{3a} is H or C₁-C₁₂ alkyl, and R^{3b} together with the carbon atom to which it is bound is taken together with an adjacent R^{3b} and the carbon atom to which it is bound to form a carbon-carbon double bond;
[0841] R^{4a} and R^{4b} are, at each occurrence, independently either: (a) H or C₁-C₁₂ alkyl; or (b) R^{4a} is H or C₁-C₁₂ alkyl, and R^{4b} together with the carbon atom to which it is bound is taken together with an adjacent R^{4b} and the carbon atom to which it is bound to form a carbon-carbon double bond;
[0842] R⁵ and R⁶ are each independently H or methyl;
[0843] R⁷ is C₄-C₂₀ alkyl;
[0844] R⁸ and R⁹ are each independently C₁-C₁₂ alkyl; or R⁸ and R⁹, together with the nitrogen atom to which they are attached, form a 5, 6 or 7-membered heterocyclic ring;
[0845] a, b, c and d are each independently an integer from 1 to 24; and
[0846] x is 0, 1 or 2.

[0847] In some embodiments, the lipids disclosed in US 2020/0121809 have a structure of Formula III:

[chemical structure]

[0848] or a pharmaceutically acceptable salt, prodrug or stereoisomer thereof, wherein:
[0849] one of L¹ or L² is —O(C═O)—, —(C═O)O—, —C(═O)—, —O—, —S(O)ₓ—, —S—S—, —C(═O)S—, SC(═O)—, —NR^{a}C(═O)—, —C(═O)NR^{a}—, NR^{a}C(═O)NR^{a}—, —OC(═O)NR^{a}— or —NR^{a}C(═O)O—, and the other of L¹ or L² is —O(C═O)—, —(C═O)O—, —C(═O)—, —O—, —S(O)ₓ—, —S—S—, —C(═O)S—, SC(═O)—, —NR^{a}C(═O)—, —C(═O)NR^{a}—, NR^{a}C(═O)NR^{a}—, —OC(═O)NR^{a}— or —NR^{a}C(═O)O— or a direct bond;
[0850] G¹ and G² are each independently unsubstituted C₁-C₁₂ alkylene or C₁-C₁₂ alkenylene;
[0851] G³ is C₁-C₂₄ alkylene, C₁-C₂₄ alkenylene, C₃-C₈ cycloalkylene, C₃-C₈ cycloalkenylene;
[0852] R^{a} is H or C₁-C₁₂ alkyl;
[0853] R¹ and R² are each independently C₆-C₂₄ alkyl or C₆-C₂₄ alkenyl;
[0854] R³ is H, OR^{S}, CN, —C(═O)OR⁴, —OC(═O)R⁴ or —NR⁵C(═O)R⁴;
[0855] R⁴ is C₁-C₁₂alkyl;
[0856] R⁵ is H or C₁-C₆ alkyl; and
[0857] x is 0, 1 or 2.

[0858] In some embodiments, the lipids disclosed in US 2020/0121809 have a structure of Formula (IV):

[chemical structure]

[0859] or a pharmaceutically acceptable salt, prodrug or stereoisomer thereof, wherein:
[0860] one of G¹ or G² is, at each occurrence, —O(C═O)—, —(C═O)O—, —C(═O)—, —O—, —S(O)_{y}—, —S—S—, —C(═O)S—, SC(═O)—, —N(R^{a})C(═O)—, —C(═O)N(R^{a})—, —N(R^{a})C(═O)N(R^{a})—, —OC(═O)N(R^{a})— or —N(R^{a})C(═O)O—, and the other of G¹ or G² is, at each occurrence, —O(C═O)—, —(C═O)O—, —C(═O)—, —O—, —S(O)_{y}—, —S—S—, —C(═O)S—, —SC(═O)—, —N(R^{a})C(═O)—, —C(═O)N(R^{a})—, —N(R^{a})C(═O)N(R^{a})—, —OC(═O)N(R^{a})— or —N(R^{a})C(═O)O— or a direct bond;
[0861] L is, at each occurrence, —O(C═O)—, wherein — represents a covalent bond to X;
[0862] X is CR^{a};
[0863] Z is alkyl, cycloalkyl or a monovalent moiety comprising at least one polar functional group when n is 1; or Z is alkylene, cycloalkylene or a polyvalent moiety comprising at least one polar functional group when n is greater than 1;
[0864] R^{a} is, at each occurrence, independently H, C₁-C₁₂alkyl, C₁-C₁₂ hydroxylalkyl, C₁-C₁₂ aminoalkyl, C₁-C₁₂alkylaminylalkyl, C₁-C₁₂ alkoxyalkyl, C₁-C₁₂ alkoxycarbonyl, C₁-C₁₂ alkylcarbonyloxy, C₁-C₁₂alkylcarbonyloxyalkyl or C₁-C₁₂alkylcarbonyl;
[0865] R is, at each occurrence, independently either: (a) H or C₁-C₁₂alkyl; or (b) R together with the carbon atom to which it is bound is taken together with an adjacent R and the carbon atom to which it is bound to form a carbon-carbon double bond;
[0866] R¹ and R² have, at each occurrence, the following structure, respectively:

[chemical structure]

[0867] a¹ and a² are, at each occurrence, independently an integer from 3 to 12;
[0868] b¹ and b² are, at each occurrence, independently 0 or 1;
[0869] c¹ and c² are, at each occurrence, independently an integer from 5 to 10;
[0870] d¹ and d² are, at each occurrence, independently an integer from 5 to 10;
[0871] y is, at each occurrence, independently an integer from 0 to 2; and
[0872] n is an integer from 1 to 6,
[0873] wherein each alkyl, alkylene, hydroxylalkyl, aminoalkyl, alkylaminylalkyl, alkoxyalkyl, alkoxycarbonyl, alkylcarbonyloxy, alkylcarbonyloxyalkyl and alkylcarbonyl is optionally substituted with one or more substituent.

[0874] In some embodiments, an LNP described herein comprises a lipid, e.g., an ionizable lipid, disclosed in US 2013/0108685, which is incorporated herein by reference in its entirety.

[0875] In some embodiments, the lipids disclosed in US 2013/0108685 are represented by the following formula (I):

[chemical structure]

[0876] wherein:
[0877] R¹ and R² are, the same or different, each linear or branched alkyl, alkenyl or alkynyl having 12 to 24 carbon atoms, or R¹ and R² are combined together to form dialkylmethylene, dialkenylmethylene, dialkynylmethylene or alkylalkenylmethylene,
[0878] X¹ and X³ are hydrogen atoms, or are combined together to form a single bond or alkylene,
[0879] X³ is absent or represents alkyl having 1 to 6 carbon atoms, or alkenyl having 3 to 6 carbon atoms,
[0880] when X³ is absent,
[0881] Y is absent, a and b are 0, L³ is a single bond, R³ is alkyl having 1 to 6 carbon atoms, alkenyl having 3 to 6 carbon atoms, pyrrolidin-3-yl, piperidin-3-yl, piperidin-4-yl, or alkyl having 1 to 6 carbon atoms or alkenyl having 3 to 6 carbon atoms substituted with 1 to 3 substituent(s), which is(are), the same or different, amino, monoalkylamino, dialkylamino, trialkylammonio, hydroxy, alkoxy, carbamoyl, monoalkylcarbamoyl, dialkylcarbamoyl, pyrrolidinyl, piperidyl or morpholinyl, and L¹ and L² are —O—,
[0882] Y is absent, a and b are, the same or different, 0 to 3, and are not 0 at the same time, L³ is a single bond, R³ is alkyl having 1 to 6 carbon atoms, alkenyl having 3 to 6 carbon atoms, pyrrolidin-3-yl, piperidin-3-yl, piperidin-4-yl, or alkyl having 1 to 6 carbon atoms or alkenyl having 3 to 6 carbon atoms substituted with 1 to 3 substituent(s), which is(are), the same or different, amino, monoalkylamino, dialkylamino, trialkylammonio, hydroxy, alkoxy, carbamoyl, monoalkylcarbamoyl, dialkylcarbamoyl, pyrrolidinyl, piperidyl or morpholinyl, L¹ and L² are, the same or different, —O—, —CO—O— or —O—CO—,
[0883] Y is absent, a and b are, the same or different, 0 to 3, L³ is a single bond, R³ is a hydrogen atom, and L¹ and L² are, the same or different, —O—, —CO—O— or —O—CO—, or
[0884] Y is absent, a and b are, the same or different, 0 to 3, L³ is —CO— or —CO—O—, R³ is pyrrolidin-2-yl, pyrrolidin-3-yl, piperidin-2-yl, piperidin-3-yl, piperidin-4-yl, morpholin-2-yl, morpholin-3-yl, or alkyl having 1 to 6 carbon atoms or alkenyl having 3 to 6 carbon atoms substituted with 1 to 3 substituent(s), which is(are), the same or different, amino, monoalkylamino, dialkylamino, trialkylammonio, hydroxy, alkoxy, carbamoyl, monoalkylcarbamoyl, dialkylcarbamoyl, pyrrolidinyl, piperidyl or morpholinyl, wherein at least one of the substituents is amino, monoalkylamino, dialkylamino, trialkylammonio, pyrrolidinyl, piperidyl or morpholinyl, and L¹ and L² are, the same or different, —O—, —CO—O— or —O—CO—, and
[0885] when X³ is alkyl having 1 to 6 carbon atoms or alkenyl having 3 to 6 carbon atoms,
[0886] Y is a pharmaceutically acceptable anion, a and b are, the same or different, 0 to 3, L³ is a single bond, R is alkyl having 1 to 6 carbon atoms, alkenyl having 3 to 6 carbon atoms, pyrrolidin-2-yl, pyrrolidin-3-yl, piperidin-2-yl, piperidin-3-yl, piperidin-4-yl, morpholin-2-yl, morpholin-3-yl, or alkyl having 1 to 6 carbon atoms or alkenyl having 3 to 6 carbon atoms substituted with 1 to 3 substituent(s), which is(are), the same or different, amino, monoalkylamino, dialkylamino, trialkylammonio, hydroxy, alkoxy, carbamoyl, monoalkylcarbamoyl, dialkylcarbamoyl, pyrrolidinyl, piperidyl or morpholinyl, L¹ and L² are, the same or different, —O—, —CO—O— or —O—CO—).

[0887] In some embodiments, an LNP described herein comprises a lipid, e.g., an ionizable lipid, disclosed in US 2013/0195920, which is incorporated herein by reference in its entirety.

[0888] In some embodiments, the lipids disclosed in US 2013/0195920 are of formula (I), which has a branched alkyl at the alpha position adjacent to the biodegradable group (between the biodegradable group and the teriary carbon):

[chemical structure]

[0889] or a salt thereof (e.g., a pharmaceutically acceptable salt thereof), wherein
[0890] R′ is absent, hydrogen, or alkyl (e.g., C₁-C₄ alkyl); with respect to R¹ and R²,
[0891] (i) R¹ and R² are each, independently, optionally substituted alkyl, alkenyl, alkynyl, cycloalkylalkyl, heterocycle, or R¹⁰;
[0892] (ii) R¹ and R², together with the nitrogen atom to which they are attached, form an optionally substituted heterocylic ring; or
[0893] (iii) one of R¹ and R² is optionally substituted alkyl, alkenyl, alkynyl, cycloalkyl, cycloalkylalkyl, or heterocycle, and the other forms a 4-10 member heterocyclic ring or heteroaryl (e.g., a 6-member ring) with (a) the adjacent nitrogen atom and (b) the (R)ₐ group adjacent to the nitrogen atom;
[0894] each occurrence of R is, independently, —(CR³R⁴)—;
[0895] each occurrence of R³ and R⁴ are, independently H, halogen, OH, alkyl, alkoxy, —NH₂, R¹⁰, alkylamino, or dialkylamino (In some embodiments, each occurrence of R³ and R⁴ are, independently H or C₁-C₄ alkyl);
[0896] each occurrence of R¹⁰ is independently selected from PEG and polymers based on poly(oxazoline), poly(ethylene oxide), poly(vinyl alcohol), poly(glycerol), poly(N-vinylpyrrolidone), poly[N-(2-hydroxypropyl)methacrylamide] and poly(amino acid)s, wherein (i) the PEG or polymer is linear or branched, (ii) the PEG or polymer is polymerized by n subunits, (iii) n is a number-averaged degree of polymerization between 10 and 200 units, and (iv) wherein the compound of formula has at most two R¹⁰ groups (preferably at most one R¹⁰ group);
[0897] the dashed line to Q is absent or a bond;
[0898] when the dashed line to Q is absent then Q is absent or is —O—, —NH—, —S—, —C(O)—, —C(O)O—, —OC(O)—, —C(O)N(R⁴)—, —N(R⁵)C(O)—, —S—S—, —OC(O)O—, —O—N═C(R⁵)—, —C(R⁵)═N—O—, —OC(O)N(R⁵)—, —N(R⁵)C(O)N(R⁵)—, —N(R⁵)C(O)O—, —C(O)S—, —C(S)O— or —C(R⁵)═N—O—C(O)—; or
[0899] when the dashed line to Q is a bond then (i) b is 0 and (ii) Q and the tertiary carbon adjacent to it (C*) form a substituted or unsubstituted, mono- or bi-cyclic heterocyclic group having from 5 to 10 ring atoms (e.g., the heteroatoms in the heterocyclic group are selected from O and S, preferably O);
[0900] each occurrence of R⁵ is, independently, H or alkyl (e.g. C₁-C₄ alkyl);
[0901] X and Y are each, independently, alkylene or alkenylene (e.g., C₄ to C₂₀ alkylene or C₄ to C₂₀ alkenylene);
[0902] M¹ and M² are each, independently, a biodegradable group (e.g., —OC(O)—, —C(O)O—, —SC(O)—, —C(O)S—, —OC(S)—, —C(S)O, —S—S—, C(R⁵)═N—, —N═C(R⁵)—, —C(R⁵)═N—O—, —O—N═C(R⁵)—, —C(O)(NR⁵)—, —N(R⁵)C(O)—, —C(S)(NR⁵)—, —N(R⁵)C(O)—, —N(R⁵)C(O)N(R⁵)—, —OC(O)O—, —OSi(R⁵)₂O—, —C(O)(CR³R⁴)C(O)O—, —OC(O)(CR³R⁴)C(O)—, or

[chemical structure]

[0903] wherein R¹¹ is a C₂-C₈ alkyl or alkenyl;
[0904] each occurrence of R^{z} is, independently, C₁-C₈ alkyl (e.g., methyl, ethyl, isopropyl, n-butyl, n-pentyl, or n-hexyl);
[0905] a is 1, 2, 3, 4, 5 or 6;
[0906] b is 0, 1, 2, or 3; and
[0907] Z¹ and Z² are each, independently, C₈-C₁₄ alkyl or C₈-C₁₄ alkenyl, wherein the alkenyl group may optionally be substituted with one or two fluorine atoms at the alpha position to a double bond which is between the double bond and the terminus of Z¹ or Z².

[0908] In some embodiments, the lipids disclosed in US 2013/0195920 are of formula (II), which has a branched alkyl at the alpha position adjacent to the biodegradable group (between the biodegradable group and the terminus of the tail, i.e., Z¹ or Z²)

[chemical structure]

[0909] or a salt thereof (e.g., a pharmaceutically acceptable salt thereof), wherein
[0910] R′ is absent, hydrogen, or alkyl (e.g., C₁-C₄ alkyl);
[0911] with respect to R¹ and R²,
[0912] (i) R¹ and R² are each, independently, optionally substituted alkyl, alkenyl, alkynyl, cycloalkylalkyl, heterocycle, or R¹⁰;
[0913] (ii) R¹ and R², together with the nitrogen atom to which they are attached, form an optionally substituted heterocylic ring; or
[0914] (iii) one of R¹ and R² is optionally substituted alkyl, alkenyl, alkynyl, cycloalkyl, cycloalkylalkyl, or heterocycle, and the other forms a 4-10 membered heterocyclic ring or heteroaryl (e.g., a 6-member ring) with (a) the adjacent nitrogen atom and (b) the (R)ₐ group adjacent to the nitrogen atom;
[0915] each occurrence of R is, independently, —(CR³R⁴)—;
[0916] each occurrence of R³ and R⁴ are, independently H, halogen, OH, alkyl, alkoxy, —NH₂, R¹⁰, alkylamino, or dialkylamino (In some embodiments, each occurrence of R³ and R⁴ are, independently H or C₁-C₄ alkyl);
[0917] each occurrence of R¹⁰ is independently selected from PEG and polymers based on poly(oxazoline), poly(ethylene oxide), poly(vinyl alcohol), poly(glycerol), poly(N-vinylpyrrolidone), poly[N-(2-hydroxypropyl)methacrylamide] and poly(amino acid)s, wherein (i) the PEG or polymer is linear or branched, (ii) the PEG or polymer is polymerized by n subunits, (iii) n is a number-averaged degree of polymerization between 10 and 200 units, and (iv) wherein the compound of formula has at most two R¹⁰ groups (preferably at most one R¹⁰ group);
[0918] the dashed line to Q is absent or a bond;
[0919] when the dashed line to Q is absent then Q is absent or is —O—, —NH—, —S—, —C(O)—, —C(O)O—, —OC(O)—, —C(O)N(R⁴)—, —N(R⁵)C(O)—, —S—S—, —OC(O)O—, —O—N═C(R⁵)—, —C(R⁵)═N—O—, —OC(O)N(R⁵)—, —N(R⁵)C(O)N(R⁵)—, —N(R⁵)C(O)O—, —C(O)S—, —C(S)O— or —C(R⁵)═N—O—C(O)—; or
[0920] when the dashed line to Q is a bond then (i) b is 0 and (ii) Q and the tertiary carbon adjacent to it (C*) form a substituted or unsubstituted, mono- or bi-cyclic heterocyclic group having from 5 to 10 ring atoms (e.g., the heteroatoms in the heterocyclic group are selected from O and S, preferably O);
[0921] each occurrence of R⁵ is, independently, H or alkyl;
[0922] X and Y are each, independently, alkylene (e.g., C₆-C₈ alkylene) or alkenylene, wherein the alkylene or alkenylene group is optionally substituted with one or two fluorine atoms at the alpha position to the M¹ or M² group
[0923] M¹ and M² are each, independently, a biodegradable group (e.g., —OC(O)—, —C(O)O—, —SC(O)—, —C(O)S—, —OC(S)—, —C(S)O, —S—S—, C(R⁵)═N—, —N═C(R⁵)—, —C(R⁵)═N—O—, —O—N═C(R⁵)—, —C(O)(NR⁵)—, —N(R⁵)C(O)—, —C(S)(NR⁵)—, —N(R⁵)C(O)—, —N(R⁵)C(O)N(R⁵)—, —OC(O)O—, —OSi(R⁵)₂O—, —C(O)(CR³R⁴)C(O)O—, —OC(O)(CR³R⁴)C(O)—, or

[chemical structure]

[0924] wherein R¹¹ is a C₂-C₈ alkyl or alkenyl;
[0925] each occurrence of R^{z} is, independently, C₁-C₈ alkyl (e.g., methyl, ethyl, isopropyl);
[0926] a is 1, 2, 3, 4, 5 or 6;
[0927] b is 0, 1, 2, or 3; and
[0928] Z¹ and Z² are each, independently, C₈-C₁₄ alkyl or C₈-C₁₄ alkenyl, wherein (i) the alkenyl group may optionally be substituted with one or two fluorine atoms at the alpha position to a double bond which is between the double bond and the terminus of Z¹ or Z²;
[0929] and (ii) the terminus of at least one of Z¹ and Z² is separated from the group M¹ or M² by at least 8 carbon atoms.

[0930] In some embodiments, the lipids disclosed in US 2013/0195920 are of formula (III), which has a branching point at a position that is 2-6 carbon atoms (i.e., at the beta (β), gamma (γ), delta (δ), epsilon (ε) or zeta position (ζ) adjacent to the biodegradable group (between the biodegradable group and the terminus of the tail, i.e., Z¹ or Z²)

[chemical structure]

[0931] or a salt thereof (e.g., a pharmaceutically acceptable salt thereof), wherein
[0932] R′, R¹, R², R, R³, R⁴, R¹⁰, Q, R⁵, M′, M², R^{z}, a, and b are defined as in formula (I);
[0933] L¹ and L² are each, independently, C₁-C₅ alkylene or C₂-C₅ alkenylene;
[0934] X and Y are each, independently, alkylene (e.g., C₄ to C₂₀ alkylene or C₆-C₈ alkylene) or alkenylene (e.g., C₄ to C₂₀ alkenylene); and
[0935] Z¹ and Z² are each, independently, C₈-C₁₄ alkyl or C₈-C₁₄ alkenyl, wherein the alkenyl group may optionally be substituted with one or two fluorine atoms at the alpha position to a double bond which is between the double bond and the terminus of Z¹ or Z².
[0936] and with the proviso that the terminus of at least one of Z¹ and Z² is separated from the group M¹ or M² by at least 8 carbon atoms.

[0937] In some embodiments, the cationic lipid disclosed in US 2013/0195920 is a compound of formula (IV), which has a branching point at a position that is 2-6 carbon atoms (i.e., at beta (β), gamma (γ), delta (δ), epsilon (ε) or zeta position (ζ) adjacent to the biodegradable group (between the biodegradable group and the terminus of the tail, i.e., Z¹ or Z²):

[chemical structure]

[0938] or a salt thereof (e.g., a pharmaceutically acceptable salt thereof), wherein
[0939] R′, R¹, R², R, R³, R⁴, R¹⁰, Q, R⁵, M², R^{z}, a, and b are defined as in formula (I);
[0940] L¹ and L² and are each, independently, C₁-C₅ alkylene or C₂-C₅ alkenylene;
[0941] X and Y are each, independently, alkylene or alkenylene (e.g., C₁₂-C₂₀ alkylene or C₁₂-C₂₀ alkenylene); and
[0942] each occurrence of Z is independently C₁-C₄ alkyl (preferably, methyl).

[0943] For example, in some embodiments, -L¹-C(Z)₃ is —CH₂C(CH₃)₃. In some embodiments, -L¹-C(Z)₃ is —CH₂CH₂C(CH₃)₃.

[0944] In some embodiments, the lipids disclosed in US 2013/0195920 are of formula (V), which has an alkoxy or thioalkoxy (i.e., —S-alkyl) group substitution on at least one tail:

[chemical structure]

[0945] or a salt thereof (e.g., a pharmaceutically acceptable salt thereof), wherein
[0946] R′, R¹, R², R, R³, R⁴, R¹⁰, Q, R⁵, M¹, M², a, and b are defined as in formula (I);
[0947] X and Y are each, independently, alkylene (e.g., C₆-C₈ alkylene) or alkenylene, wherein the alkylene or alkenylene group is optionally substituted with one or two fluorine atoms at the alpha position to the M¹ or M² group;
[0948] Z¹ and Z² are each, independently, C₈-C₁₄ alkyl or C₈-C₁₄ alkenyl, wherein (i) the C₈-C₁₄ alkyl or C₈-C₁₄ alkenyl of at least one of Z¹ and Z² is substituted by one or more alkoxy (e.g., a C₁-C₄ alkoxy such as —OCH₃) or thioalkoxy (e.g., a C₁-C₄ thioalkoxy such as —SCH₃) groups, and (ii) the alkenyl group may optionally be substituted with one or two fluorine atoms at the alpha position to a double bond which is between the double bond and the terminus of Z¹ or Z².

[0949] In some embodiments, the lipids disclosed in US 2013/0195920 are of formula (VIA), which has one or more fluoro substituents on at least one tail at a position that is either alpha to a double bond or alpha to a biodegradable group:

[chemical structure]

[0950] or a salt thereof (e.g., a pharmaceutically acceptable salt thereof), wherein
[0951] R¹, R², R, a, and b are as defined with respect to formula (I);
[0952] Q is absent or is —O—, —NH—, —S—, —C(O)—, —C(O)O—, —OC(O)—, —C(O)N(R⁴)—, —N(R⁵)C(O)—, —S—S—, —OC(O)O—, —O—N═C(R⁵)—, —C(R⁵)═N—O—, —OC(O)N(R⁵)—, —N(R⁵)C(O)N(R⁵)—, —N(R⁵)C(O)O—, —C(O)S—, —C(S)O— or —C(R⁵)═N—O—C(O)—;
[0953] R′ is absent, hydrogen, or alkyl (e.g., C₁-C₄ alkyl); and each of R⁹ and R¹⁰ are independently C₁₂-C₂₄ alkyl (e.g., C₁₂-C₂₀ alkyl), C₁₂-C₂₄ alkenyl (e.g., C₁₂-C₂₀ alkenyl), or C₁₂-C₂₄ alkoxy (e.g., C₁₂-C₂₀ alkoxy) (a) having one or more biodegradable groups and (b) optionally substituted with one or more fluorine atoms at a position which is (i) alpha to a biodegradable group and between the biodegradable group and the tertiary carbon atom marked with an asterisk (*), or (ii) alpha to a carbon-carbon double bond and between the double bond and the terminus of the R⁹ or R¹⁰ group; each biodegradable group independently interrupts the C₁₂-C₂₄ alkyl, alkenyl, or alkoxy group or is substituted at the terminus of the C₁₂-C₂₄ alkyl, alkenyl, or alkoxy group, wherein
[0954] (i) at least one of R⁹ and R¹⁰ contains a fluoro group;
[0955] (ii) the compound does not contain the following moiety:

[chemical structure]

[0956] wherein [symbol] is an optional bond; and
[0957] (iii) the terminus of R⁹ and R¹⁰ is separated from the tertiary carbon atom marked with an asterisk (*) by a chain of 8 or more atoms (e.g., 12 or 14 or more atoms).

[0958] In some embodiments, the terminus of R⁹ and R¹⁰ is separated from the tertiary carbon atom marked with an asterisk (*) by a chain of 18-22 carbon atoms (e.g., 18-20 carbon atoms).

[0959] In some embodiments, the lipids disclosed in US 2013/0195920 are of formula (VIB), which has one or more fluoro substituents on at least one tail at a position that is either alpha to a double bond or alpha to a biodegradable group:

[chemical structure]

[0960] or a salt thereof (e.g., a pharmaceutically acceptable salt thereof), wherein
[0961] R′, R¹, R², R, R³, R⁴, R¹⁰, Q, R⁵, M¹, M², a, and b are defined as in formula (I);
[0962] X and Y are each, independently, alkylene (e.g., C₆-C₈ alkylene) or alkenylene, wherein the alkylene or alkenylene group is optionally substituted with one or two fluorine atoms at the alpha position to the M¹ or M² group; and
[0963] Z¹ and Z² are each, independently, C₈-C₁₄ alkyl or C₈-C₁₄ alkenyl, wherein said C₈-C₁₄ alkenyl is optionally substituted by one or more fluorine atoms at a position that is alpha to a double bond,
[0964] wherein at least one of X, Y, Z¹, and Z² contains a fluorine atom.

[0965] In some embodiments, the lipids disclosed in US 2013/0195920 are of formula (VII), which has an acetal group as a biodegradable group in at least one tail:

[chemical structure]

[0966] or a salt thereof (e.g., a pharmaceutically acceptable salt thereof), wherein
[0967] R′, R¹, R², R, R³, R⁴, R¹⁰, Q, R⁵, a, and b are defined as in formula (I);
[0968] X and Y are each, independently, alkylene (e.g., C₆-C₈ alkylene) or alkenylene, wherein the alkylene or alkenylene group is optionally substituted with one or two fluorine atoms at the alpha position to the M¹ or M² group
[0969] M¹ and M² are each, independently, a biodegradable group (e.g., —OC(O)—, —C(O)O—, —SC(O)—, —C(O)S—, —OC(S)—, —C(S)O, —S—S—, C(R⁵)═N—, —N═C(R⁵)—, —C(R⁵)═N—O—, —O—N═C(R⁵)—, —C(O)(NR⁵)—, —N(R⁵)C(O)—, —C(S)(NR⁵)—, —N(R⁵)C(O)—, —N(R⁵)C(O)N(R⁵)—, —OC(O)O—, —OSi(R⁵)₂O—, —C(O)(CR³R⁴)C(O)O—, —OC(O)(CR³R⁴)C(O)—, or

[chemical structure]

wherein R¹¹ is a C₄-C₁₀ alkyl or C₄-C₁₀ alkenyl;
[0970] with the proviso that at least one of M¹ and M² is

[chemical structure]

and
[0971] Z¹ and Z² are each, independently, C₄-C₁₄ alkyl or C₄-C₁₄ alkenyl, wherein the alkenyl group may optionally be substituted with one or two fluorine atoms at the alpha position to a double bond which is between the double bond and the terminus of Z¹ or Z².

[0972] In some embodiments, an LNP described herein comprises a lipid, e.g., an ionizable lipid, disclosed in US 2015/0005363, which is incorporated herein by reference in its entirety.

[0973] In some embodiments, an LNP described herein comprises a lipid, e.g., an ionizable lipid, disclosed in US 2014/0308304, which is incorporated herein by reference in its entirety.

[0974] In some embodiments, the lipid disclosed in US 2014/0308304 is a compound of formula (I):

[chemical structure]

[0975] or a salt thereof e.g., a pharmaceutically acceptable salt thereof), wherein
[0976] Xaa is a D- or L-amino acid residue having the formula —NR^{N}—CR¹R²—(C═O)—, or a peptide of amino acid residues having the formula —{NR^{N}—CR¹R²—(C═O)}ₙ—, wherein n is 2 to 20;
[0977] R¹ is independently, for each occurrence, a non-hydrogen, substituted or unsubstituted side chain of an amino acid;
[0978] R² and R^{N} are independently, for each occurrence, hydrogen, an organic group consisting of carbon, oxygen, nitrogen, sulfur, and hydrogen atoms, or any combination of the foregoing, and having from 1 to 20 carbon atoms, C₍₁₋₅₎alkyl, cycloalkyl, cycloalkylalkyl, C₍₃₋₅₎alkenyl, C₍₃₋₅₎alkynyl, C₍₁₋₅₎alkanoyl, C₍₁₋₅₎alkanoyloxy, C₍₁₋₅₎alkoxy, C₍₁₋₅₎alkoxy-C₍₁₋₅₎alkyl, C₍₁₋₅₎alkoxy-C₍₁₋₅₎alkoxy, C₍₁₋₅₎alkyl-amino-C₍₁₋₅₎alkyl-, C₍₁₋₅₎dialkyl-amino-C₍₁₋₅₎alkyl-, nitro-C₍₁₋₅₎alkyl, cyano-C₍₁₋₅₎alkyl, aryl-C₍₁₋₅₎alkyl, 4-biphenyl-C₍₁₋₅₎alkyl, carboxyl, or hydroxyl;
[0979] Z is NH, O, S, —CH₂S—, —CH₂S(O)—, or an organic linker consisting of 1-40 atoms selected from hydrogen, carbon, oxygen, nitrogen, and sulfur atoms (preferably, Z is NH or O);
[0980] R^{x} and R^{y} are, independently, (i) a lipophilic tail derived from a lipid (which can be naturally-occurring or synthetic), phospholipid, glycolipid, triacylglycerol, glycerophospholipid, sphingolipid, ceramide, sphingomyelin, cerebroside, or ganglioside, wherein the tail optionally includes a steroid; (ii) an amino acid terminal group selected from hydrogen, hydroxyl, amino, and an organic protecting group; or (iii) a substituted or unsubstituted C₍₃₋₂₂₎alkyl, C₍₆₋₁₂₎cycloalkyl, C₍₆₋₁₂₎cycloalkyl-C₍₃₋₂₂₎alkyl, C₍₃₋₂₂₎alkenyl, C₍₃₋₂₂₎alkynyl, C₍₃₋₂₂₎alkoxy, or C₍₆₋₁₂₎-alkoxy-C₍₃₋₂₂₎alkyl;
[0981] one of R^{x} and R^{y} is a lipophilic tail as defined above and the other is an amino acid terminal group, or both
[0982] R^{x} and R^{y} are lipophilic tails;
[0983] at least one of R^{x} and R^{y} is interrupted by one or more biodegradable groups (e.g., —OC(O)—, —C(O)O—, —SC(O)—, —C(O)S—, —OC(S)—, —C(S)O—, —S—S—, —C(R⁵)═N—, —N═C(R⁵)—, —C(R⁵)═N—O—, —O—N═C(R⁵)—, —C(O)(NR⁵)—, —N(R⁵)C(O)—, —C(S)(NR⁵)—, —N(R⁵)C(O)—, —N(R⁵)C(O)N(R⁵)—, —OC(O)O—, —OSi(R⁵)₂O—, —C(O)(CR³R⁴)C(O)O—, —OC(O)(CR³R⁴)C(O)— or

[chemical structure]

[0984] (wherein R¹¹ is a C₂-C₈ alkyl or alkenyl), in which each occurrence of R⁵ is, independently, H or alkyl; and
[0985] each occurrence of R³ and R⁴ are, independently H, halogen, OH, alkyl, alkoxy, —NH₂, alkylamino, or dialkylamino; or R³ and R⁴, together with the carbon atom to which they are directly attached, form a cycloalkyl group (in some embodiments, each occurrence of R³ and R⁴ are, independently H or C₁-C₄ alkyl)); and
[0986] R^{x} and R^{y} each, independently, optionally have one or more carbon-carbon double bonds.

[0987] In some embodiments, the lipid disclosed in US 2014/0308304 is a compound of formula (IA):

[chemical structure]

[0988] or a salt thereof (e.g., a pharmaceutically acceptable salt thereof), wherein
[0989] Z and Xaa are as defined with respect to formula (I) (the variables which are used in the definition of Xaa, namely R^{N}, R¹ and R², are also as defined in formula (I));
[0990] each occurrence of R is, independently, —(CR³R⁴)—;
[0991] each occurrence of R³ and R⁴ are, independently H, halogen, OH, alkyl, alkoxy, —NH₂, alkylamino, or dialkylamino (in some embodiments, each occurrence of R³ and R⁴ are, independently H or C₁-C₄ alkyl); or R³ and R⁴, together with the carbon atom to which they are directly attached, form a cycloalkyl group, wherein no more than three R groups in each chain between the —Z-Xaa-C(O)— and Z² moieties are cycloalkyl (e.g., cyclopropyl);
[0992] Q¹ and Q² are each, independently, absent, —O—, —S—, —OC(O)—, —C(O)O—, —SC(O)—, —C(O)S—, —OC(S)—, —C(S)O—, —S—S—, —C(O)(NR⁵)—, —N(R⁵)C(O)—, —C(S)(NR⁵)—, —N(R⁵)C(O)—, —N(R⁵)C(O)N(R⁵)—, or —OC(O)O—;
[0993] Q³ and Q⁴ are each, independently, H, —(CR³R⁴)—, cycloalkyl, heterocyclyl, heterocyclylalkyl, aryl, heteroaryl, or a cholesterol moiety;
[0994] each occurrence of A¹, A², A³ and A⁴ is, independently, —(CR⁵R⁵—CR⁵═CR⁵)—;
[0995] M¹ and M² are each, independently, a biodegradable group (e.g., —OC(O)—, —C(O)O—, —SC(O)—, —C(O)S—, —OC(S)—, —C(S)O—, —S—S—, —C(R⁵)═N—, —N═C(R⁵)—, —C(R⁵)═N—O—, —O—N═C(R⁵)—, —C(O)(NR⁵)—, —N(R⁵)C(O)—, —C(S)(NR⁵)—, —N(R⁵)C(O)—, —N(R⁵)C(O)N(R⁵)—, —OC(O)O—, —OSi(R⁵)₂O—, —C(O)(CR³R⁴)C(O)O—, —OC(O)(CR³R⁴)C(O)—, or

[chemical structure]

[0996] (wherein R¹¹ is a C₂-C₈ alkyl or alkenyl));
[0997] each occurrence of R⁵ is, independently, H or alkyl (e.g., C₁-C₄ alkyl);
[0998] Z² is absent, alkylene or —O—P(O)(OH)—O—;
[0999] each [symbol] attached to Z² is an optional bond, such that when Z² is absent, Q³ and Q⁴ are not directly covalently bound together;
[1000] c, d, e, f, i, j, m, n, q and r are each, independently, 0, 1, 2, 3, 4, 5, 6, 7, 8, 9, or 10;
[1001] g and h are each, independently, 0, 1 or 2;
[1002] k and l are each, independently, 0 or 1, wherein at least one of k and 1 is 1;
[1003] and p are each, independently, 0, 1 or 2; and
[1004] Q³ and Q⁴ are each, independently, separated from the —Z-Xaa-C(O)— moiety by a chain of 8 or more atoms (e.g., 12 or 14 or more atoms).

[1005] In some embodiments the lipids disclosed in US 2014/0308304 are of the formula (IC

[chemical structure]

[1006] or a salt thereof (e.g., a pharmaceutically acceptable salt thereof), wherein
[1007] Z and Xaa are as defined with respect to formula (I) (the variables which are used in the definition of Xaa, namely R^{N}, R¹ and R², are also as defined in formula (I));
[1008] each of R⁹ and R¹⁰ are, independently, alkylene or alkenylene;
[1009] each of R¹¹ and R¹² are, independently, alkyl or alkenyl, optionally terminated by COOR¹³ wherein each R¹³ is independently unsubstituted alkyl (e.g., C₁-C₄ alkyl such as methyl or ethyl), substituted alkyl (such as benzyl), or cycloalkyl;
[1010] M¹ and M² are each, independently, a biodegradable group (e.g., —OC(O)—, —C(O)O—, —SC(O)—, —C(O)S—, —OC(S)—, —C(S)O—, —S—S—, —C(R⁵)═N—, —N═C(R⁵)—, —C(R⁵)═N—O—, —O—N═C(R⁵)—, —C(O)(NR⁵)—, —N(R⁵)C(O)—, —C(S)(NR⁵)—, —N(R⁵)C(O)—, —N(R⁵)C(O)N(R⁵)—, —OC(O)O—, —OSi(R⁵)₂O—, —C(O)(CR³R⁴)C(O)O—, —OC(O)(CR³R⁴)C(O)—, or

[chemical structure]

[1011] wherein R¹¹ is a C₂-C₈ alkyl or alkenyl, in which each occurrence of R⁵ is, independently, H or alkyl; and each occurrence of R³ and R⁴ are, independently H, halogen, OH, alkyl, alkoxy, —NH₂, alkylamino, or dialkylamino; or R³ and R⁴, together with the carbon atom to which they are directly attached, form a cycloalkyl group (in some embodiments, each occurrence of R³ and R⁴ are, independently H or C₁-C₄ alkyl));
[1012] R⁹, M¹, and R¹¹ are together at least 8 carbon atoms in length (e.g., 12 or 14 carbon atoms or longer); and
[1013] R¹⁰, M², and R¹² are together at least 8 carbon atoms in length (e.g., 12 or 14 carbon atoms or longer).

[1014] In some embodiments, the lipid disclosed in US 2014/0308304 is a compound of the formula II:

[chemical structure]

[1015] or a salt thereof (e.g., a pharmaceutically acceptable salt thereof), wherein:
[1016] s is 1, 2, 3 or 4; and
[1017] R⁷ is selected from lysyl, ornithyl, 2,3-diaminobutyryl, histidyl and an acyl moiety of the formula:

[chemical structure]

[1018] t is 1, 2 or 3;
[1019] the NH₃⁺ moiety in the acyl moiety in R⁷ is optionally absent;
[1020] each occurrence of Y⁻ is independently a pharmaceutically acceptable anion (e.g., halide, such as chloride);
[1021] R⁵ and R⁶ are each, independently a lipophilic tail derived from a naturally-occurring or synthetic lipid, phospholipid, glycolipid, triacylglycerol, glycerophospholipid, sphingolipid, ceramide, sphingomyelin, cerebroside, or ganglioside, wherein the tail may contain a steroid; or a substituted or unsubstituted C₍₃₋₂₂₎alkyl, C₍₆₋₁₂₎cycloalkyl, C₍₆₋₁₂₎cycloalkyl-C₍₃₋₂₂₎alkyl, C₍₃₋₂₂₎alkenyl, C₍₃₋₂₂₎alkynyl, C₍₃₋₂₂₎alkoxy, or C₍₆₋₁₂₎alkoxy-C₍₃₋₂₂₎alkyl;
[1022] at least one of R⁵ and R⁶ is interrupted by one or more biodegradable groups (e.g., —SC(O)—, —C(O)S—, —OC(S)—, —C(S)O—, —S—S—, —C(O)(NR^{a})—, —N(R^{a})C(O)—, —C(S)(NR^{a})—, —N(R^{a})C(O)—, —N(R^{a})C(O)N(R^{a})—, or —OC(O)O—);
[1023] each occurrence of R^{a} is, independently, H or alkyl; and
[1024] R⁵ and R⁶ each, independently, optionally contain one or more carbon-carbon double bonds.

[1025] In some embodiments, the lipids disclosed in US 2014/0308304 are of the formula (IIA):

[chemical structure]

[1026] or a salt thereof (e.g., a pharmaceutically acceptable salt thereof), wherein:
[1027] R⁷ and s are as defined with respect to formula (II);
[1028] each occurrence of R is, independently, —(CR³R⁴)—;
[1029] each occurrence of R³ and R⁴ are, independently H, halogen, OH, alkyl, alkoxy, —NH₂, alkylamino, or dialkylamino (in some embodiments, each occurrence of R³ and R⁴ are, independently H or C₁-C₄ alkyl);
[1030] or R³ and R⁴, together with the carbon atom to which they are directly attached, form a cycloalkyl group, wherein no more than three R groups in each chain attached to the nitrogen N* are cycloalkyl (e.g., cyclopropyl);
[1031] Q¹ and Q² are each, independently, absent, —O—, —S—, —OC(O)—, —C(O)O—, —SC(O)—, —C(O)S—, —OC(S)—, —C(S)O—, —S—S—, —C(O)(NR₅)—, —N(R⁵)C(O)—, —C(S)(NR⁵)—, —N(R⁵)C(O)—, —N(R⁵)C(O)N(R⁵)—, or —OC(O)O—;
[1032] Q³ and Q⁴ are each, independently, H, —(CR³R⁴)—, aryl, cycloalkyl, heterocyclyl, heterocyclylalkyl, heteroaryl, or a cholesterol moiety;
[1033] each occurrence of A¹, A², A³ and A⁴ is, independently, —(CR⁵R⁵—CR⁵═CR⁵)—;
[1034] M¹ and M² are each, independently, a biodegradable group (e.g., —OC(O)—, —C(O)O—, —SC(O)—, —C(O)S—, —OC(S)—, —C(S)O—, —S—S—, —C(R⁵)═N—, —N═C(R⁵)—, —C(R⁵)═N—O—, —O—N═C(R⁵)—, —C(O)(NR₅)—, —N(R⁵)C(O)—, —C(S)(NR₅)—, —N(R⁵)C(O)—, —N(R⁵)C(O)N(R⁵)—, —OC(O)O—, —OSi(R⁵)₂O—, —C(O)(CR³R⁴)C(O)O—, —OC(O)(CR³R⁴)C(O)—, or

[chemical structure]

[1035] wherein R¹¹ is a C₂-C₈ alkyl or alkenyl;
[1036] each occurrence of R⁵ is, independently, H or alkyl;
[1037] Z is absent, alkylene or —O—P(O)(OH)—O—;
[1038] each [symbol] attached to Z is an optional bond, such that when Z is absent, Q³ and Q⁴ are not directly covalently bound together,
[1039] c, d, e, f, i, j, m, n, q and r are each, independently, 0, 1, 2, 3, 4, 5, 6, 7, 8, 9, or 10;
[1040] g and h are each, independently, 0, 1 or 2;
[1041] k and l are each, independently, 0 or 1, where at least one of k and 1 is 1; and
[1042] and p are each, independently, 0, 1 or 2.

[1043] In some embodiments the lipid disclosed in US 2014/0308304 are of the formula (IIC):

[chemical structure]

[1044] or a salt thereof (e.g., a pharmaceutically acceptable salt thereof), wherein:
[1045] R⁷ and s are as defined with respect to formula (II);
[1046] each of R⁹ and R¹⁰ are independently alkyl (e.g., C₁₂-C₂₄ alkyl) or alkenyl (e.g., C₁₂-C₂₄ alkenyl);
[1047] each of R¹¹ and R¹² are independently alkyl or alkenyl, optionally terminated by COOR¹³ where each R¹³ is independently alkyl (e.g., C₁-C₄ alkyl such as methyl or ethyl);
[1048] M¹ and M² are each, independently, a biodegradable group (e.g., —OC(O)—, —C(O)O—, —SC(O)—, —C(O)S—, —OC(S)—, —C(S)O—, —S—S—, —C(R⁵)═N—, —N═C(R⁵)—, —C(R⁵)═N—O—, —O—N═C(R⁵)—, —C(O)(NR⁵)—, —N(R⁵)C(O)—, —C(S)(NR⁵)—, —N(R⁵)C(O)—, —N(R⁵)C(O)N(R⁵)—, —OC(O)O—, —OSi(R⁵)₂O—, —C(O)(CR³R⁴)C(O)O—, —OC(O)(CR³R⁴)C(O)—, or

[chemical structure]

[1049] wherein R¹¹ is a C₂-C₈ alkyl or alkenyl;
[1050] in which each occurrence of R⁵ is, independently, H or alkyl; and each occurrence of R³ and R⁴ are, independently H, halogen, OH, alkyl, alkoxy, —NH₂, alkylamino, or dialkylamino; or R³ and R⁴, together with the carbon atom to which they are directly attached, form a cycloalkyl group (in some embodiments, each occurrence of R³ and R⁴ are, independently, H or C₁-C₄ alkyl));
[1051] R⁹, M¹, and R¹¹ are together at least 8 carbons atoms in length (e.g., 12 or 14 carbon atoms or longer); and
[1052] R¹⁰, M², and R¹² are together at least 8 carbons atoms in length (e.g., 12 or 14 carbon atoms or longer).

[1053] In some embodiments, the lipid disclosed in US 2014/0308304 is a compound of the formula (4):

[chemical structure]

[1054] wherein:
[1055] X is N or P;
[1056] R¹, R², R, a, b, M¹, and M² are as defined with respect to formula (I);
[1057] Q is absent or is —O—, —NH—, —S—, —C(O)O—, —OC(O)—, —C(O)N(R⁴)—, —N(R⁵)C(O)—, —S—S—, —OC(O)O—, —O—N═C(R⁵)—, —C(R⁵)═N—O—, —OC(O)N(R⁵)—, —N(R⁵)C(O)N(R⁵)—, —N(R⁵)C(O)O—, —C(O)S—, —C(S)O— or —C(R⁵)═N—O—C(O)—;
[1058] R′ is absent, hydrogen, or alkyl (e.g., C₁-C₄ alkyl);
[1059] each of R⁹ and R¹⁰ are independently alkylene, or alkenylene; and
[1060] each of R¹¹ and R¹² are independently alkyl or alkenyl, optionally terminated by COOR¹³ where each R¹³ is independently alkyl (e.g., C₁-C₄ alkyl such as methyl or ethyl);
[1061] R⁹, M¹, and R¹¹ are together at least 8 carbons atoms in length (e.g., 12 or 14 carbon atoms or longer); and
[1062] R¹⁰, M², and R¹² are together at least 8 carbons atoms in length (e.g., 12 or 14 carbon atoms or longer).

[1063] In some embodiments, the lipid disclosed in US 2014/0308304 is a compound of the formula (5)

[chemical structure]

[1064] wherein:
[1065] X is N or P;
[1066] R¹, R², R, a, and b are as defined with respect to formula (I);
[1067] Q is absent or is —O—, —NH—, —S—, —C(O)O—, —OC(O)—, —C(O)N(R⁴)—, —N(R⁵)C(O)—, —S—S—, —OC(O)O—, —O—N═C(R⁵)—, —C(R⁵)═N—O—, —OC(O)N(R⁵)—, —N(R⁵)C(O)N(R⁵)—, —N(R⁵)C(O)O—, —C(O)S—, —C(S)O— or —C(R⁵)═N—O—C(O)—; R′ is absent, hydrogen, or alkyl (e.g., C₁-C₄ alkyl);
[1068] each of R⁹ and R¹⁰ are independently C₁₂-C₂₄ alkyl or alkenyl substituted at its terminus with a biodegradable group, such as —COOR¹³ where each R¹³ is independently alkyl (preferably C₁-C₄ alkyl such as methyl or ethyl).

[1069] In some embodiments the lipids disclosed in US 2014/0308304 are of Formula A:

[chemical structure]

[1070] or a pharmaceutically acceptable salt or stereoisomer thereof, wherein:
[1071] n is 0-6 (e.g., n is 0, 1 or 2);
[1072] R¹ and R² are independently selected from H, (C₁-C₆)alkyl, heterocyclyl, and a polyamine, wherein said alkyl, heterocyclyl and polyamine are optionally substituted with one or more substituents selected from R′, or R¹ and R² can be taken together with the nitrogen to which they are attached to form a monocyclic heterocycle with 3-7 (e.g., 4-7) members optionally containing, in addition to the nitrogen, one or two additional heteroatoms selected from N, O and S, said monocyclic heterocycle is optionally substituted with one or more substituents selected from R′;
[1073] R³ is selected from H and (C₁-C₆)alkyl, wherein said alkyl is optionally substituted with one or more substituents selected from R′, or R³ can be taken together with R¹ to form a monocyclic heterocycle with 3-7 (e.g., 4-7) members optionally containing, in addition to the nitrogen, one or two additional heteroatoms selected from N, O and S, said monocyclic heterocycle is optionally substituted with one or more substituents selected from R′;
[1074] each occurrence of R⁴, R^{3′} and R^{4′} is independently selected from H, (C₁-C₆)alkyl and O-alkyl, said alkyl is optionally substituted with one or more substituents selected from R′; or R^{3′} and R^{4′} when directly bound to the same carbon atom form an oxo (═O) group, cyclopropyl or cyclobutyl; or R³ and R⁴ form an oxo (═O) group;
[1075] R⁵ is selected from H and (C₁-C₆)alkyl; or R⁵ can be taken together with R¹ to form a monocyclic heterocycle with 4-7 members optionally containing, in addition to the nitrogen, one or two additional heteroatoms selected from N, O and S, said monocyclic heterocycle is optionally substituted with one or more substituents selected from R′;
[1076] each occurrence of R′ is independently selected from halogen, R″, OR″, SR″, CN, CO₂R″ and CON(R″)₂;
[1077] each occurrence of R″ is selected from H and (C₁-C₆)alkyl, wherein said alkyl is optionally substituted with one or more substituents selected from halogen and OH;
[1078] L¹ is a C₄-C₂₂ alkyl or C₄-C₂₂ alkenyl, said alkyl or alkenyl is optionally interrupted by or terminated with one or more biodegradable groups; and said alkyl or alkenyl is optionally substituted with one or more substituents selected from R′; and L² is a C₄-C₂₂ alkyl or C₄-C₂₂ alkenyl, said alkyl or alkenyl is optionally interrupted by or terminated with one or more biodegradable groups; and said alkyl or alkenyl is optionally substituted with one or more substituents selected from R′;
[1079] with the proviso that the CR^{3′}R^{4′} group when present adjacent to the nitrogen atom in formula A is not a ketone (—C(O)—).

[1080] In some embodiments the lipids disclosed in US 2014/0308304 are of formula B:

[chemical structure]

[1081] or a pharmaceutically acceptable salt or stereoisomer thereof, wherein:
[1082] n is 0, 1, 2, 3, 4, or 5;
[1083] R⁶ and R⁷ are each independently (i) C₁-C₄ linear or branched alkyl (e.g., methyl or ethyl) optionally substituted with 1-4 R′, or (ii) C₃-C₈ cycloalkyl (e.g., C₃-C₆ cycloalkyl); or R⁶ and R⁷ together with the nitrogen atom adjacent to them form a 3-6 membered ring;
[1084] L¹ is a C₄-C₂₂ alkyl or C₄-C₂₂ alkenyl, said alkyl or alkenyl optionally interrupted by or terminated with one or more biodegradable groups; and said alkyl or alkenyl is optionally substituted with 1-5 substituents selected from R′; and
[1085] L² is a C₄-C₂₂ alkyl or C₄-C₂₂ alkenyl, said alkyl or alkenyl optionally interrupted by or terminated with one or more biodegradable groups; and said alkyl or alkenyl is optionally substituted with 1-5 substituents selected from R′;
[1086] each occurrence of R′ is independently selected from halogen, R″, OR″, SR″, CN, CO₂R″ and CON(R″)₂; and
[1087] each occurrence of R″ is independently selected from H and (C₁-C₆)alkyl, wherein said alkyl is optionally substituted with one or more substituents selected from halogen and OH.

[1088] In some embodiments, lipids disclosed in US 2014/0308304 are of formula C:

[chemical structure]

[1089] or a pharmaceutically acceptable salt or stereoisomer thereof, wherein:
[1090] n is 0, 1, 2, 3, 4, or 5;
[1091] L¹ is a C₄-C₂₂alkyl or C₄-C₂₂alkenyl, said alkyl or alkenyl optionally has one or more biodegradable groups; each biodegradable group independently interrupts the alkyl or alkenyl group or is substituted at the terminus of the alkyl or alkenyl group, and said alkyl or alkenyl is optionally substituted with 1-5 substituents selected from R′; and
[1092] L² is a C₄-C₂₂ alkyl or C₄-C₂₂ alkenyl, said alkyl or alkenyl optionally interrupted by or terminated with one or more biodegradable groups; and said alkyl or alkenyl is optionally substituted with 1-5 substituents selected from R′;
[1093] each occurrence of R′ is independently selected from halogen, R″, OR″, SR″, CN, CO₂R″ and CON(R″)₂; and
[1094] each occurrence of R″ is independently selected from H and (C₁-C₆)alkyl, wherein said alkyl is optionally substituted with one or more substituents selected from halogen and OH.

[1095] In some embodiments, the lipid disclosed in US 2014/0308304 are of formula D:

[chemical structure]

[1096] or a pharmaceutically acceptable salt or stereoisomer thereof, wherein
[1097] m is 0, 1, 2, or 3;
[1098] n is 0, 1, 2, 3, 4, or 5;
[1099] R⁶ and R⁷ are each independently (i) C₁-C₄ linear or branched alkyl (e.g., methyl or ethyl) optionally substituted with 1-4 R′, or (ii) C₃-C₈ cycloalkyl (e.g., C₃-C₆ cycloalkyl); or R⁶ and R⁷ together with the nitrogen atom adjacent to them form a 3-6 membered ring;
[1100] L¹ is a C₄-C₂₂ alkyl or C₄-C₂₂ alkenyl, said alkyl or alkenyl optionally interrupted by or terminated with one or more biodegradable groups; and said alkyl or alkenyl is optionally substituted with 1-5 substituents selected from R′; and
[1101] L² is a C₄-C₂₂ alkyl or C₄-C₂₂ alkenyl, said alkyl or alkenyl optionally interrupted by or terminated with one or more biodegradable groups; and said alkyl or alkenyl is optionally substituted with 1-5 substituents selected from R′;
[1102] each occurrence of R′ is independently selected from halogen, R″, OR″, SR″, CN, CO₂R″ and CON(R″)₂; and
[1103] each occurrence of R″ is independently selected from H and (C₁-C₆)alkyl, wherein said alkyl is optionally substituted with one or more substituents selected from halogen and OH.

[1104] In some embodiments lipid disclosed in US 2014/0308304 are of formula E:

[chemical structure]

[1105] or a pharmaceutically acceptable salt or stereoisomer thereof, wherein
[1106] n is 0, 1, 2, 3, 4, or 5;
[1107] the group “amino acid” is an amino acid residue;
[1108] L¹ is a C₄-C₂₂ alkyl or C₄-C₂₂ alkenyl, said alkyl or alkenyl optionally interrupted by or terminated with one or more biodegradable groups, and said alkyl or alkenyl is optionally substituted with 1-5 substituents selected from R′; and
[1109] L² is a C₄-C₂₂ alkyl or C₄-C₂₂ alkenyl, said alkyl or alkenyl optionally interrupted by or terminated with one or more biodegradable groups, and said alkyl or alkenyl is optionally substituted with 1-5 substituents selected from R′;
[1110] each occurrence of R′ is independently selected from halogen, R″, OR″, SR″, CN, CO₂R″ and CON(R″)₂; and
[1111] each occurrence of R″ is independently selected from H and (C₁-C₆)alkyl, wherein said alkyl is optionally substituted with one or more substituents selected from halogen and OH.

[1112] The amino acid residue in formula E may have the formula —C(O)—C(R⁹)(NH₂), where R⁹ is an amino acid side chain.

[1113] In some embodiments, the lipid disclosed in US 2014/0308304 are of formula F:

[chemical structure]

[1114] or a pharmaceutically acceptable salt or stereoisomer thereof, wherein:
[1115] R⁶ and R⁷ are independently (i) C₁-C₄ linear or branched alkyl (e.g., methyl or ethyl) optionally substituted with 1-4 R′, or (ii) C₃-C₈ cycloalkyl (e.g., C₃-C₆ cycloalkyl); or R⁶ and R⁷ together with the nitrogen atom adjacent to them form a 3-6 membered ring;
[1116] L¹ is a C₄-C₂₂ alkyl or C₄-C₂₂ alkenyl optionally interrupted by or terminated with one or more biodegradable groups, and said alkyl or alkenyl is optionally substituted with 1-5 substituents selected from R′; and
[1117] L² is a C₄-C₂₂ alkyl or C₄-C₂₂ alkenyl optionally interrupted by or terminated with one or more biodegradable groups, and said alkyl or alkenyl is optionally substituted with 1-5 substituents selected from R′;
[1118] each occurrence of R′ is independently selected from halogen, R″, OR″, SR″, CN, CO₂R″ and CON(R″)₂;
[1119] each occurrence of R″ is independently selected from H and (C₁-C₆)alkyl, wherein said alkyl is optionally substituted with one or more substituents selected from halogen and OH.

[1120] In some embodiments, the lipid disclosed in US 2014/0308304 are of formula G:

[chemical structure]

[1121] or a pharmaceutically acceptable salt or stereoisomer thereof, wherein:
[1122] n is 0, 1, 2, 3, 4, or 5;
[1123] q is 1, 2, 3, or 4
[1124] R⁶ and R⁷ are independently (i) C₁-C₄ linear or branched alkyl (e.g., methyl or ethyl) optionally substituted with 1-4 R′, or (ii) C₃-C₈ cycloalkyl (e.g., C₃-C₆ cycloalkyl);
[1125] L¹ is a C₄-C₂₂ alkyl or C₄-C₂₂ alkenyl optionally interrupted by or terminated with one or more biodegradable groups, and said alkyl or alkenyl is optionally substituted with 1-5 substituents selected from R′; and
[1126] L² is a C₄-C₂₂ alkyl or C₄-C₂₂ alkenyl optionally interrupted by or terminated with one or more biodegradable groups, and said alkyl or alkenyl is optionally substituted with 1-5 substituents selected from R′;
[1127] each occurrence of R′ is independently selected from halogen, R″, OR″, SR″, CN, CO₂R″ and CON(R″)₂;
[1128] each occurrence of R″ is independently selected from H and (C₁-C₆)alkyl, wherein said alkyl is optionally substituted with one or more substituents selected from halogen and OH.

[1129] In some embodiments, an LNP described herein comprises a lipid, e.g., an ionizable lipid, disclosed in US 2013/0053572, which is incorporated herein by reference in its entirety.

[1130] In some embodiments, the lipids disclosed in US 2013/0053572 are of Formula A:

[chemical structure]

[1131] wherein:
[1132] n is 0, 1 or 2;
[1133] R¹ and R² are independently selected from H, (C₁-C₆)alkyl, heterocyclyl, and a polyamine, wherein said alkyl, heterocyclyl and polyamine are optionally substituted with one or more substituents selected from R′, or R¹, and R² can be taken together with the nitrogen to which they are attached to form a monocyclic heterocycle with 4-7 members optionally containing, in addition to the nitrogen, one or two additional heteroatoms selected from N, O and S, said monocyclic heterocycle is optionally substituted with one or more substituents selected from R′;
[1134] R³ is selected from H and (C₁-C₆)alkyl, wherein said alkyl is optionally substituted with one or more substituents selected from R′, or R³ can be taken together with R¹ to form a monocyclic heterocycle with 4-7 members optionally containing, in addition to the nitrogen, one or two additional heteroatoms selected from N, O and S, said monocyclic heterocycle is optionally substituted with one or more substituents selected from R′;
[1135] R⁴ is selected from H, (C₁-C₆)alkyl and O-alkyl, said alkyl is optionally substituted with one or more substituents selected from R′;
[1136] R⁵ is selected from H and (C₁-C₆)alkyl; or R⁵ can be taken together with R¹ to form a monocyclic heterocycle with 4-7 members optionally containing, in addition to the nitrogen, one or two additional heteroatoms selected from N, O and S, said monocyclic heterocycle is optionally substituted with one or more substituents selected from R′;
[1137] R′ is independently selected from halogen, R″, OR″, CN, CO₂R″ and CON(R″)₂; R″ is selected from H and (C₁-C₆)alkyl, wherein said alkyl is optionally substituted with one or more substituents selected from halogen and OH;
[1138] L₁ is a C₄-C₂₂alkenyl, said alkenyl is optionally substituted with one or more substituents selected from R′; and L₂ is a C₄-C₂₂alkenyl, said alkenyl is optionally substituted with one or more substituents selected from R′; or any pharmaceutically acceptable salt or stereoisomer thereof.

[1139] In some embodiments, an LNP described herein comprises a lipid, e.g., an ionizable lipid, disclosed in US Application publication US2017/0119904, which is incorporated by reference herein, in its entirety.

[1140] In some embodiments, an LNP described herein comprises a lipid, e.g., an ionizable lipid, disclosed in PCT Application publication WO2021/204179, which is incorporated by reference herein, in its entirety.

[1141] In some embodiments, an LNP described herein comprises a lipid, e.g., an ionizable lipid, disclosed in PCT Application WO2022/251665A1, which is incorporated by reference herein, in its entirety.

[1142] In some embodiments, an LNP described herein comprises an ionizable lipid of Table Z:

TABLE Z
Exemplary Ionizable Lipids

| Compound # | Structure |
|---|---|
| L-1 | [chemical structure] |
| L-2 | [chemical structure] |
| L-3 | [chemical structure] |
| L-4 | [chemical structure] |
| L-5 | [chemical structure] |
| L-6 | [chemical structure] |
| L-7 | [chemical structure] |
| L-8 | [chemical structure] |
| L-9 | [chemical structure] |
| L-10 | [chemical structure] |

[1143] In some embodiments, an LNP of the present disclosure comprises an ionizable lipid disclosed in PCT Application PCT/US2022/076430.

### Formula (VII-A)

[1144] In some embodiments, Lipids of the Disclosure have a structure of Formula (VII-A):

[chemical structure]

[1145] or a pharmaceutically acceptable salt thereof, wherein:
   [1146] A is —N(—X¹R¹)—, —C(R′)(-L¹-N(R″)R⁶)—, —C(R′)(—OR^{7a})—, —C(R′)(—N(R″)R^{8a})—, —C(R′)(—C(═O)OR^{9a})—, —C(R′)(—C(═O)N(R″)R^{10a})—, or —C(═N—R^{11a})—;
   [1147] T is —X^{2a}—Y^{1a}-Q^{1a} or —X³—C(═O)OR⁴;
   [1148] X¹ is optionally substituted C₂-C₆ alkylenyl;
   [1149] R′ is —OH, —R^{1a},

[chemical structure]

[1150] Z¹ is optionally substituted C₁-C₆ alkyl;
[1151] Z^{1a} is hydrogen or optionally substituted C₁-C₆ alkyl;
[1152] X² and X^{2a} are independently optionally substituted C₂-C₁₄ alkylenyl or optionally substituted C₂-C₁₄ alkenylenyl;
[1153] X³ is optionally substituted C₂-C₁₄ alkylenyl or optionally substituted C₂-C₁₄ alkenylenyl;
[1154] (i) Y¹ is

[chemical structure]

[1155] wherein the bond marked with an “*” is attached to X²;
   [1156] Y^{1a} is

[chemical structure]

[1157] wherein the bond marked with an “*” is attached to X^{2a};
   [1158] each Z² is independently H or optionally substituted C₁-C₈ alkyl;
   [1159] each Z³ is independently optionally substituted C₁-C₆ alkylenyl;
   [1160] Q¹ is —NR²R³, —CH(OR²)(OR³), —CR²═C(R³)(R¹²), or —C(R²)(R³)(R¹²);
   [1161] Q^{1a} is —NR^{2′}R^{3′}, —CH(OR^{2′})(OR^{3′}), —CR²═C(R³)(R¹²), or —C(R^{2′})(R^{3′})(R^{12′}); or
   [1162] (ii) Y¹ is

[chemical structure]

[1163] wherein the bond marked with an “*” is attached to X²;
   [1164] Y^{1a} is

[chemical structure]

[1165] wherein the bond marked with an “*” is attached to X^{2a};
   [1166] each Z² is independently H or optionally substituted C₁-C₈ alkyl;
   [1167] each Z³ is independently optionally substituted C₁-C₆ alkylenyl;
   [1168] Q¹ is —NR²R³
   [1169] Q^{1a} is —NR^{2′}R^{3′};
   [1170] R², R³, and R¹² are independently hydrogen, optionally substituted C₁-C₁₄ alkyl, optionally substituted C₂-C₁₄ alkenylenyl, or —(CH₂)ₘ-G-(CH₂)ₙH;
   [1171] R^{2′}, R^{3′}, and R^{12′} are independently hydrogen, optionally substituted C₁-C₁₄ alkyl, optionally substituted C₂-C₁₄ alkenylenyl, or —(CH₂)ₘ-G-(CH₂)ₙH;
   [1172] G is a C₃-C₈ cycloalkylenyl;
   [1173] each m is independently 0, 1, 2, 3, 4, 5, 6, 7, 8, 9, 10, 11, or 12;
   [1174] each n is independently 0, 1, 2, 3, 4, 5, 6, 7, 8, 9, 10, 11, or 12;
   [1175] X³ is optionally substituted C₂-C₁₄ alkylenyl;
   [1176] R⁴ is optionally substituted C₄-C₁₄ alkyl;
   [1177] L¹ is C₁-C₈ alkylenyl;
   [1178] R⁶ is C₁-C₆ alkyl, (hydroxy)C₁-C₆ alkyl, or (amino)C₁-C₆ alkyl
   [1179] R^{7a} is —C(═O)N(R′″)R^{7b}, —C(═S)N(R′″)R^{7b}, —N═C(R^{7b})(R^{7c}), or

[chemical structure]

[1180] R^{7b} is C₁-C₆ alkyl, (hydroxy)C₁-C₆ alkyl, or (amino)C₁-C₆ alkyl;
[1181] R^{7c} is hydrogen or C₁-C₆ alkyl;
[1182] R^{8a} is —C(═O)N(R′″)R^{8b}, —C(═S)N(R′ƒ)R^{8b}, —N═C(R^{8b})(R^{8c}), or

[chemical structure]

[1183] R^{8b} is C₁-C₆ alkyl, (hydroxy)C₁-C₆ alkyl, or (amino)C₁-C₆ alkyl;
[1184] R^{8c} is hydrogen or C₁-C₆ alkyl;
[1185] R^{9a} is —N═C(R^{9b})(R^{9c});
[1186] R⁹ is C₁-C₆ alkyl, (hydroxy)C₁-C₆ alkyl, or (amino)C₁-C₆ alkyl;
[1187] R^{9c} is hydrogen or C₁-C₆ alkyl;
[1188] R^{10a} is —N═C(R^{10b})(R^{10c});
[1189] R^{10b} is C₁-C₆ alkyl, (hydroxy)C₁-C₆ alkyl, or (amino)C₁-C₆ alkyl;
[1190] R^{10c} is hydrogen or C₁-C₆ alkyl;
[1191] R^{11a} is —OR^{11b}, —N(R″)R^{11b}, —OC(═O)R^{11b}, or —N(R″)C(═O)R^{11b};
[1192] R^{11b} is C₁-C₆ alkyl, (hydroxy)C₁-C₆ alkyl, or (amino)C₁-C₆ alkyl;
[1193] R′ is hydrogen or C₁-C₆ alkyl;
[1194] R″ is hydrogen or C₁-C₆ alkyl; and
[1195] R′″ is hydrogen or C₁-C₆ alkyl.

### Formula (VIII-A)

[1196] In some embodiments, Lipids of the Disclosure have a structure of Formula (VII-A), wherein the Lipids of the Disclosure have a structure of Formula (VIII-A):

[chemical structure]

or a pharmaceutically acceptable salt thereof.

### Formula (IX-A)

[1197] In some embodiments, Lipids of the Disclosure have a structure of Formula (VII-A), wherein the Lipids of the Disclosure have a structure of Formula (IX-A):

[chemical structure]

or a pharmaceutically acceptable salt thereof.

[1198] In some embodiments, Lipids of the Disclosure have a structure of Formula (VII-A), wherein A is —N(—X¹R¹)—.

[1199] In some embodiments, Lipids of the Disclosure have a structure of Formula (VII-A), wherein T is —X^{2a}—Y^{1a}-Q^{1a}.

[1200] In some embodiments, Lipids of the Disclosure have a structure of Formula (VII-A), wherein T is —X³—C(═O)OR⁴.

[1201] In some embodiments, Lipids of the Disclosure have a structure of Formula (VII-A), (VIII-A), or (IX-A), wherein X² and/or X^{2a} are/is optionally substituted C₂-C₁₄ alkylenyl (e.g., C₄-C₁₀ alkylenyl, C₅-C₇ alkylenyl, C₅, C₆, or C₇ alkylenyl). In some embodiments, Lipids of the Disclosure have a structure of Formula (VII-A), (VIII-A), or (IX-A), wherein X² is C₄-C₁₀ alkylenyl. In some embodiments, Lipids of the Disclosure have a structure of Formula (VII-A), (VIII-A), or (IX-A), wherein X^{2a} is C₄-C₁₀ alkylenyl. In some embodiments, Lipids of the Disclosure have a structure of Formula (VII-A), (VIII-A), or (IX-A), wherein X² is C₅ alkylenyl. In some embodiments, Lipids of the Disclosure have a structure of Formula (VII-A), (VIII-A), or (IX-A), wherein X² is C₆ alkylenyl. In some embodiments, Lipids of the Disclosure have a structure of Formula (VII-A), (VIII-A), or (IX-A), wherein X^{2a} is C₅ alkylenyl. In some embodiments, Lipids of the Disclosure have a structure of Formula Formula (VII-A), (VIII-A), or (IX-A), wherein X^{2a} is C₆ alkylenyl.

[1202] In some embodiments, Lipids of the Disclosure have a structure of Formula (VII-A), (VIII-A), or (IX-A), wherein Y¹ and/or Y^{1a} are/is

[chemical structure]

[1203] In some embodiments, Lipids of the Disclosure have a structure of Formula (VII-A), (VIII-A), or (IX-A), wherein Y¹ is

[chemical structure]

[1204] In some embodiments, Lipids of the Disclosure have a structure of Formula (VII-A), (VIII-A), or (IX-A), wherein Y^{1a} is

[chemical structure]

[1205] In some embodiments, Lipids of the Disclosure have a structure of Formula (VII-A), (VIII-A), or (IX-A), wherein Y¹ and/or Y^{1a} are/is

[chemical structure]

[1206] In some embodiments, Lipids of the Disclosure have a structure of Formula (VII-A), (VIII-A), or (IX-A), wherein Y¹ is

[chemical structure]

[1207] In some embodiments, Lipids of the Disclosure have a structure of Formula (VII-A), (VIII-A), or (IX-A), wherein Y^{1a} is

[chemical structure]

[1208] In some embodiments, Lipids of the Disclosure have a structure of Formula (VII-A), (VIII-A), or (IX-A), wherein Y¹ and/or Y^{1a} are/is

[chemical structure]

wherein Z² is hydrogen.

[1209] In some embodiments, Lipids of the Disclosure have a structure of Formula (VII-A), (VIII-A), or (IX-A), wherein Y¹ is

[chemical structure]

wherein Z² is hydrogen.

[1210] In some embodiments, Lipids of the Disclosure have a structure of Formula (VII-A), (VIII-A), or (IX-A), wherein Y^{1a} is

[chemical structure]

wherein Z² is hydrogen.

[1211] In some embodiments, Lipids of the Disclosure have a structure of Formula (VII-A), (VIII-A), or (IX-A), wherein Y¹ and/or Y^{1a} are/is

[chemical structure]

wherein Z² is hydrogen.

[1212] In some embodiments, Lipids of the Disclosure have a structure of Formula (VII-A), (VIII-A), or (IX-A), wherein Y¹ is

[chemical structure]

wherein Z² is hydrogen.

[1213] In some embodiments, Lipids of the Disclosure have a structure of Formula (VII-A), (VIII-A), or (IX-A), wherein Y^{1a} is

[chemical structure]

wherein Z² is hydrogen.

[1214] In some embodiments, Lipids of the Disclosure have a structure of Formula (VII-A), (VIII-A), or (IX-A), wherein Y¹ and Y^{1a} are independently

[chemical structure]

[1215] In some embodiments, Lipids of the Disclosure have a structure of Formula (VII-A), (VIII-A), or (IX-A), wherein Y¹ is independently

[chemical structure]

[1216] In some embodiments, Lipids of the Disclosure have a structure of Formula (VII-A), (VIII-A), or (IX-A), wherein Y^{1a} is independently

[chemical structure]

[1217] In some embodiments, Lipids of the Disclosure have a structure of Formula (VII-A), (VIII-A), or (IX-A), wherein Q¹ and/or Q^{1a} are/is —NR²R³. In some embodiments, Lipids of the Disclosure have a structure of Formula (VII-A), (VIII-A), or (IX-A), wherein Q¹ is —NR²R³. In some embodiments, Lipids of the Disclosure have a structure of Formula (VII-A), (VIII-A), or (IX-A), wherein Q^{1a} is —NR²R³.

[1218] In some embodiments, Lipids of the Disclosure have a structure of Formula (VII-A), (VIII-A), or (IX-A), wherein Q¹ and/or Q^{1a} are/is —CH(OR²)(OR³). In some embodiments, Lipids of the Disclosure have a structure of Formula (VII-A), (VIII-A), or (IX-A), wherein Q¹ is —CH(OR²)(OR³). In some embodiments, Lipids of the Disclosure have a structure of Formula (VII-A), (VIII-A), or (IX-A), wherein Q^{1a} is —CH(OR²)(OR³).

[1219] In some embodiments, Lipids of the Disclosure have a structure of Formula (VII-A), (VIII-A), or (IX-A), wherein Q¹ and/or Q^{1a} are/is —CR²═C(R³)(R¹²). In some embodiments, Lipids of the Disclosure have a structure of Formula (VII-A), (VIII-A), or (IX-A), wherein Q¹ is —CR²═C(R³)(R¹²). In some embodiments, Lipids of the Disclosure have a structure of Formula (VII-A), (VIII-A), or (IX-A), wherein Q^{1a} is —CR²═C(R³)(R¹²).

[1220] In some embodiments, Lipids of the Disclosure have a structure of Formula (VII-A), (VIII-A), or (IX-A), wherein Q¹ and/or Q^{1a} are/is —C(R²)(R³)(R¹²). In some embodiments, Lipids of the Disclosure have a structure of Formula (VII-A), (VIII-A), or (IX-A), wherein Q¹ is —C(R²)(R³)(R¹²). In some embodiments, Lipids of the Disclosure have a structure of Formula (VII-A), (VIII-A), or (IX-A), wherein Q^{1a} is —C(R²)(R³)(R¹²).

[1221] In some embodiments, Lipids of the Disclosure have a structure of Formula (VII-A), (VIII-A), or (IX-A), wherein X³ is optionally substituted C₂-C₁₄ alkylenyl (e.g., C₄-C₁₀ alkylenyl, C₅-C₇ alkylenyl, C₅, C₆, or C₇ alkylenyl). In some embodiments, Lipids of the Disclosure have a structure of Formula (VII-A), (VIII-A), or (IX-A), wherein X³ is C₅-C₇ alkylenyl. In some embodiments, Lipids of the Disclosure have a structure of Formula (VII-A), (VIII-A), or (IX-A), wherein X³ is C₅ alkylenyl.

[1222] In some embodiments, Lipids of the Disclosure have a structure of Formula (VII-A), (VIII-A), or (IX-A), wherein R², R³, R¹², R^{2′}, R^{3′}, and/or R^{12′} are hydrogen. In some embodiments, Lipids of the Disclosure have a structure of Formula (VII-A), (VIII-A), or (IX-A), wherein R² is hydrogen. In some embodiments, Lipids of the Disclosure have a structure of Formula (VII-A), (VIII-A), or (IX-A), wherein R³, is hydrogen. In some embodiments, Lipids of the Disclosure have a structure of Formula (VII-A), (VIII-A), or (IX-A), wherein R¹² is hydrogen. In some embodiments, Lipids of the Disclosure have a structure of Formula (VII-A), (VIII-A), or (IX-A), wherein R^{2′} is hydrogen. In some embodiments, Lipids of the Disclosure have a structure of Formula (VII-A), (VIII-A), or (IX-A), wherein R^{3′} is hydrogen. In some embodiments, Lipids of the Disclosure have a structure of Formula (VII-A), (VIII-A), or (IX-A), wherein R^{12′} is hydrogen.

[1223] In some embodiments, Lipids of the Disclosure have a structure of Formula (VII-A), (VIII-A), or (IX-A), wherein R², R³, R¹², R^{2′}, R^{3′}, and/or R^{12′} are optionally substituted C₁-C₁₄ alkyl (e.g., C₅-C₁₄, C₅-C₁₀, C₆-C₉, C₅, C₆, C₇, C₈, C₉, C₁₀ alkyl). In some embodiments, Lipids of the Disclosure have a structure of Formula (VII-A), (VIII-A), or (IX-A), wherein R² is C₅-C₁₀ alkyl. In some embodiments, Lipids of the Disclosure have a structure of Formula (VII-A), (VIII-A), or (IX-A), wherein R³ is C₅-C₁₀ alkyl. In some embodiments, Lipids of the Disclosure have a structure of Formula (VII-A), (VIII-A), or (IX-A), wherein R¹² is C₅-C₁₀ alkyl. In some embodiments, Lipids of the Disclosure have a structure of Formula (VII-A), (VIII-A), or (IX-A), wherein R^{2′} is C₅-C₁₀ alkyl. In some embodiments, Lipids of the Disclosure have a structure of Formula (VII-A), (VIII-A), or (IX-A), wherein R^{3′} is C₅-C₁₀ alkyl. In some embodiments, Lipids of the Disclosure have a structure of Formula (VII-A), (VIII-A), or (IX-A), wherein R^{12′} is C₅-C₁₀ alkyl. In some embodiments, Lipids of the Disclosure have a structure of Formula (VII-A), (VIII-A), or (IX-A), wherein R² is C₈ alkyl. In some embodiments, Lipids of the Disclosure have a structure of Formula (VII-A), (VIII-A), or (IX-A), wherein R³ is C₈ alkyl. In some embodiments, Lipids of the Disclosure have a structure of Formula (VII-A), (VIII-A), or (IX-A), wherein R¹² is C₈ alkyl. In some embodiments, Lipids of the Disclosure have a structure of Formula (VII-A), (VIII-A), or (IX-A), wherein R^{2′} is C₈ alkyl. In some embodiments, Lipids of the Disclosure have a structure of Formula (VII-A), (VIII-A), or (IX-A), wherein R^{3′} is C₈ alkyl. In some embodiments, Lipids of the Disclosure have a structure of Formula (VII-A), (VIII-A), or (IX-A), wherein R^{12′} is C₈ alkyl.

[1224] In some embodiments, Lipids of the Disclosure have a structure of Formula (VII-A) or (IX-A), wherein R⁴ is optionally substituted C₄-C₁₄ alkyl (e.g., C₆-C₁₂, C₈-C₁₂, C₆, C₇, C₈, C₉, C₁₀, C₁₁, C₁₂ alkyl).

[1225] In some embodiments, Lipids of the Disclosure have a structure of Formula (VII-A) or (IX-A), wherein R⁴ is C₆-C₁₂ alkyl. In some embodiments, Lipids of the Disclosure have a structure of Formula (VII-A), (VIII-A), or (IX-A), wherein R⁴ is C₁₁ alkyl.

[1226] In some embodiments, Lipids of the Disclosure have a structure of Formula (VII-A), (VIII-A), or (IX-A), wherein R¹ is OH.

[1227] In some embodiments, Lipids of the Disclosure have a structure of Formula (VII-A), (VIII-A), or (IX-A), wherein X¹ is C₂₋₄ alkylenyl (e.g., C₂, C₃, or C₄ alkylenyl). In some embodiments, Lipids of the Disclosure have a structure of Formula (VII-A), (VIII-A), or (IX-A), wherein X¹ is C₂ alkylenyl. In some embodiments, Lipids of the Disclosure have a structure of Formula (VII-A), (VIII-A), or (IX-A), wherein X¹ is C₄ alkylenyl.

### Formula (VII-B)

[1228] In some embodiments, Lipids of the Disclosure have a structure of Formula (VII-B):

[chemical structure]

[1229] or a pharmaceutically acceptable salt thereof, wherein:
   [1230] A is —C(R′)(-L¹-N(R″)R⁶)—, —C(R′)(—OR^{7a})—, —C(R′)(—N(R″)R^{8a})—, —C(R′)(—C(═O)OR^{9a})—, —C(R′)(—C(═O)N(R″)R^{10a})—, or —C(═N—R^{11a})—;
   [1231] T is —X^{2a}—Y^{1a}-Q^{1a} or —X³—C(═O)OR⁴;
   [1232] X² and X^{2a} are independently optionally substituted C₂-C₁₄ alkylenyl or optionally substituted C₂-C₁₄ alkenylenyl;
   [1233] X³ is optionally substituted C₁-C₁₄ alkylenyl or optionally substituted C₂-C₁₄ alkenylenyl;
   [1234] Y¹ is

[chemical structure]

[1235] wherein the bond marked with an “*” is attached to X²;
   [1236] Y^{1a} is

[chemical structure]

[1237] wherein the bond marked with an “*” is attached to X^{2a};
   [1238] each Z³ is independently optionally substituted C₁-C₆ alkylenyl or optionally substituted C₂-C₁₄ alkenylenyl;
   [1239] Q¹ is —NR²R³, —CH(OR²)(OR³), —CR²═C(R³)(R¹²), or —C(R²)(R³)(R¹²);
   [1240] Q^{1a} is —NR^{2′}R^{3′}, —CH(OR^{2′})(OR^{3′}), —CR²═C(R³)(R¹²), or —C(R^{2′})(R^{3′})(R^{12′});
   [1241] R^{2′}, R^{3′}, and R^{12′} are independently hydrogen, optionally substituted C₁-C₁₄ alkyl, optionally substituted C₂-C₁₄ alkenylenyl, or —(CH₂)ₘ-G-(CH₂)ₙH;
   [1242] R^{2′}, R^{3′}, and R^{12′} are independently hydrogen, optionally substituted C₁-C₁₄ alkyl, optionally substituted C₂-C₁₄ alkenylenyl, or —(CH₂)ₘ-G-(CH₂)ₙH;
   [1243] G is a C₃-C₈ cycloalkylenyl;
   [1244] each m is independently 0, 1, 2, 3, 4, 5, 6, 7, 8, 9, 10, 11, or 12;
   [1245] each n is independently 0, 1, 2, 3, 4, 5, 6, 7, 8, 9, 10, 11, or 12;
   [1246] X³ is optionally substituted C₂-C₁₄ alkylenyl;
   [1247] R⁴ is optionally substituted C₄-C₁₄ alkyl;
   [1248] L¹ is C₁-C₈ alkylenyl;
   [1249] R⁶ is (hydroxy)C₁-C₆ alkyl, or (amino)C₁-C₆ alkyl.
   [1250] R^{7a} is —C(═O)N(R′″)R^{7b}, —C(═S)N(R′″)R^{7b}, —N═C(R^{7b})(R^{7c}),

[chemical structure]

[1251] Z¹ is optionally substituted C₁-C₆ alkyl;
[1252] R¹⁰ is C₁-C₆ alkylenyl;
[1253] R^{7b} is C₁-C₆ alkyl, (hydroxy)C₁-C₆ alkyl, or (amino)C₁-C₆ alkyl;
[1254] R^{7c} is hydrogen or C₁-C₆ alkyl;
[1255] R^{8a} is —C(═O)N(R′″)R^{8b}, —C(═S)N(R′″)R^{8b}, —N═C(R^{8b})(R^{8c}),

[chemical structure]

[1256] R^{8b} is C₁-C₆ alkyl, (hydroxy)C₁-C₆ alkyl, or (amino)C₁-C₆ alkyl;
[1257] R^{8c} is hydrogen or C₁-C₆ alkyl;
[1258] R^{9a} is —N═C(R^{9b})(R^{9c});
[1259] R^{9b} is C₁-C₆ alkyl, (hydroxy)C₁-C₆ alkyl, or (amino)C₁-C₆ alkyl;
[1260] R^{9c} is hydrogen or C₁-C₆ alkyl;
[1261] R^{10a} is —N═C(R^{10b})(R^{10c});
[1262] R^{10b} is C₁-C₆ alkyl, (hydroxy)C₁-C₆ alkyl, or (amino)C₁-C₆ alkyl;
[1263] R^{10c} is hydrogen or C₁-C₆ alkyl;
[1264] R^{11a} is —OR^{11b}, —N(R″)R^{11b}, —OC(═O)R^{11b}, or —N(R″)C(═O)R^{11b};
[1265] R^{11b} is C₁-C₆ alkyl, (hydroxy)C₁-C₆ alkyl, or (amino)C₁-C₆ alkyl;
[1266] R′ is hydrogen or C₁-C₆ alkyl;
[1267] R″ is hydrogen or C₁-C₆ alkyl; and
[1268] R′″ is hydrogen or C₁-C₆ alkyl.

[1269] In some embodiments, Lipids of the Disclosure have a structure of Formula (VII-B), wherein A is —C(R′)(-L¹-N(R″)R⁶)—.

[1270] In some embodiments, Lipids of the Disclosure have a structure of Formula (VII-B), wherein A is —C(R′)(—OR^{7a})—.

[1271] In some embodiments, Lipids of the Disclosure have a structure of Formula (VII-B), wherein A is —C(R′)(—N(R″)R^{8a}).

[1272] In some embodiments, Lipids of the Disclosure have a structure of Formula (VII-B), wherein A is —C(R′)(—C(═O)OR^{9a}).

[1273] In some embodiments, Lipids of the Disclosure have a structure of Formula (VII-B), wherein A is —C(R′)(—C(═O)N(R″)R^{10a})—.

[1274] In some embodiments, Lipids of the Disclosure have a structure of Formula (VII-B), wherein A is —C(═N—R^{11a})—.

[1275] In some embodiments, Lipids of the Disclosure have a structure of Formula (VII-B), wherein T is —X^{2a}—Y^{1a}-Q^{1a}.

[1276] In some embodiments, Lipids of the Disclosure have a structure of Formula (VII-B), wherein T is —X³—C(═O)OR⁴.

[1277] In some embodiments, Lipids of the Disclosure have a structure of Formula (VII-B), wherein X² and/or X^{2a} are/is optionally substituted C₂-C₁₄ alkylenyl (e.g., C₂-C₁₀ alkylenyl, C₂-C₈ alkylenyl, C₂, C₃, C₄, C₅, C₆, C₇, or C₈ alkylenyl). In some embodiments, Lipids of the Disclosure have a structure of Formula (VII-B), wherein X² is C₂-C₁₄ alkylenyl. In some embodiments, Lipids of the Disclosure have a structure of Formula (VII-B), wherein X^{2a} is C₂-C₁₄ alkylenyl

[1278] In some embodiments, Lipids of the Disclosure have a structure of Formula (VII-B), wherein Y¹ and/or Y^{1a} are/is

[chemical structure]

[1279] In some embodiments, Lipids of the Disclosure have a structure of Formula (VII-B), wherein Y¹ is

[chemical structure]

[1280] In some embodiments, Lipids of the Disclosure have a structure of Formula (VII-B), wherein Y^{1a} is

[chemical structure]

[1281] In some embodiments, Lipids of the Disclosure have a structure of Formula (VII-B), wherein Y¹ and/or Y^{1a} are/is

[chemical structure]

[1282] In some embodiments, Lipids of the Disclosure have a structure of Formula (VII-B), wherein Y¹ is

[chemical structure]

[1283] In some embodiments, Lipids of the Disclosure have a structure of Formula (VII-B), wherein Y^{1a} is

[chemical structure]

[1284] In some embodiments, Lipids of the Disclosure have a structure of Formula (VII-B), wherein Y¹ and/or Y^{1a} are/is

[chemical structure]

[1285] In some embodiments, Lipids of the Disclosure have a structure of Formula (VII-B), wherein Y¹ is

[chemical structure]

[1286] In some embodiments, Lipids of the Disclosure have a structure of Formula (VII-B), wherein Y^{1a} is

[chemical structure]

[1287] In some embodiments, Lipids of the Disclosure have a structure of Formula (VII-B), wherein Y¹ and/or Y^{1a} are/is

[chemical structure]

[1288] In some embodiments, Lipids of the Disclosure have a structure of Formula (VII-B), wherein Y¹ is

[chemical structure]

[1289] In some embodiments, Lipids of the Disclosure have a structure of Formula (VII-B), wherein Y^{1a} is

[chemical structure]

[1290] In some embodiments, Lipids of the Disclosure have a structure of Formula (VII-B), wherein Q¹ and/or Q^{1a} are/is —C(R^{2′})(R^{3′})(R^{12′}). In some embodiments, Lipids of the Disclosure have a structure of Formula (VII-B), wherein Q¹ is —C(R^{2′})(R^{3′})(R^{12′}). In some embodiments, Lipids of the Disclosure have a structure of Formula (VII-B), wherein Q^{1a} is —C(R^{2′})(R^{3′})(R^{12′}).

[1291] In some embodiments, Lipids of the Disclosure have a structure of Formula (VII-B), wherein X³ is optionally substituted C₁-C₁₄ alkylenyl (e.g., C₁-C₆, C₁-C₄ alkylenyl). In some embodiments, Lipids of the Disclosure have a structure of Formula (VII-B), wherein X³ is C₁-C₁₄ alkylenyl.

[1292] In some embodiments, Lipids of the Disclosure have a structure of Formula (VII-B), wherein R², R³, R¹², R^{2′}, R^{3′}, and/or R^{12′} are hydrogen. In some embodiments, Lipids of the Disclosure have a structure of Formula (VII-B), wherein R² is hydrogen. In some embodiments, Lipids of the Disclosure have a structure of Formula (VII-B), wherein R³ is hydrogen. In some embodiments, Lipids of the Disclosure have a structure of Formula (VII-B), wherein R¹² is hydrogen. In some embodiments, Lipids of the Disclosure have a structure of Formula (VII-B), wherein R^{2′} is hydrogen. In some embodiments, Lipids of the Disclosure have a structure of Formula (VII-B), wherein R^{3′} is hydrogen. In some embodiments, Lipids of the Disclosure have a structure of Formula (VII-B), wherein R^{12′} is hydrogen.

[1293] In some embodiments, Lipids of the Disclosure have a structure of Formula (VII-B), wherein R², R³, R¹², R^{2′}, R^{3′}, and/or R^{12′} are optionally substituted C₁-C₁₄ alkyl (e.g., C₄-C₁₀ alkyl, C₅, C₆. C₇. C₈, C₉ alkyl). In some embodiments, Lipids of the Disclosure have a structure of Formula (VII-B), wherein R² is C₄-C₁₀ alkyl. In some embodiments, Lipids of the Disclosure have a structure of Formula (VII-B), wherein R³ is C₄-C₁₀ alkyl. In some embodiments, Lipids of the Disclosure have a structure of Formula (VII-B), wherein R¹² is C₄-C₁₀ alkyl. In some embodiments, Lipids of the Disclosure have a structure of Formula (VII-B), wherein R^{2′} is C₄-C₁₀ alkyl. In some embodiments, Lipids of the Disclosure have a structure of Formula (VII-B), wherein R^{3′} is C₄-C₁₀ alkyl. In some embodiments, Lipids of the Disclosure have a structure of Formula (VII-B), wherein R^{12′} is C₄-C₁₀ alkyl.

[1294] In some embodiments, Lipids of the Disclosure have a structure of Formula (VII-B), wherein R⁴ is optionally substituted C₄-C₁₄ alkyl (e.g., C₈-C₁₄ alkyl, linear C₈-C₁₄ alkyl, C₈, C₉, C₁₀, C₁₁, C₁₂, C₁₃, or C₁₄ alkyl). In some embodiments, Lipids of the Disclosure have a structure of Formula (VII-B), wherein R⁴ is linear C₈-C₁₄ alkyl. In some embodiments, Lipids of the Disclosure have a structure of Formula (VII-B), wherein R⁴ is linear C₁₁ alkyl.

[1295] In some embodiments, Lipids of the Disclosure have a structure of Formula (VII-B), wherein L¹ is C₁-C₃ alkylenyl.

[1296] In some embodiments, Lipids of the Disclosure have a structure of Formula (VII-B), wherein R⁶ is (hydroxy)C₁-C₆ alkyl.

[1297] In some embodiments, Lipids of the Disclosure have a structure of Formula (VII-B), wherein R^{7a} is

[chemical structure]

In some embodiments, Lipids of the Disclosure have a structure of Formula (VII-B), wherein R^{7a} is

[chemical structure]

In some embodiments, Lipids of the Disclosure have a structure of Formula (VII-B), wherein R^{7a} is H

[chemical structure]

[1298] In some embodiments, Lipids of the Disclosure have a structure of Formula (VII-B), wherein R^{7a} is selected from the group consisting of —C(═O)N(R′″)R^{7b}, —C(═S)N(R′″)R^{7b}, and —N═C(R^{7b})(R^{7c}). In some embodiments, Lipids of the Disclosure have a structure of Formula (VII-B), wherein R^{7a} is —C(═O)N(R′″)R^{7b}. In some embodiments, Lipids of the Disclosure have a structure of Formula (VII-B), wherein R^{7a} is —C(═S)N(R′″)R^{7b}. In some embodiments, Lipids of the Disclosure have a structure of Formula (VII-B), wherein R^{7a} is —N═C(R^{7b})(R^{7c}).

[1299] In some embodiments, Lipids of the Disclosure have a structure of Formula (VII-B), wherein R^{8a} is selected from the group consisting of —C(═O)N(R′″)R^{8b}, —C(═S)N(R′″)R^{8b}, and —N═C(R^{8b})(R^{8c}). In some embodiments, Lipids of the Disclosure have a structure of Formula (VII-B), wherein R^{8a} is —C(═O)N(R′″)R^{8b}. In some embodiments, Lipids of the Disclosure have a structure of Formula (VII-B), wherein R^{8a} is —C(═S)N(R′″)R^{8b}. In some embodiments, Lipids of the Disclosure have a structure of Formula (VII-B), wherein R^{8a} is —N═C(R^{8b})(R^{c}).

[1300] In some embodiments, Lipids of the Disclosure have a structure of Formula (VII-B), wherein R^{8a}

[chemical structure]

[1301] In some embodiments, Lipids of the Disclosure have a structure of Formula (VII-B), wherein R^{9b} is (hydroxy)C₁-C₆ alkyl.

[1302] In some embodiments, Lipids of the Disclosure have a structure of Formula (VII-B), wherein R^{10b} is (amino)C₁-C₆ alkyl.

[1303] In some embodiments, Lipids of the Disclosure have a structure of Formula (VII-B), wherein R^{11a} is —OR^{11b} or —OC(═O)R^{11b}. In some embodiments, Lipids of the Disclosure have a structure of Formula (VII-B), wherein R^{11a} is —OR^{11b}. In some embodiments, Lipids of the Disclosure have a structure of Formula (VII-B), wherein R^{11a} is —OC(═O)R^{11b}.

[1304] In some embodiments, Lipids of the Disclosure have a structure of Formula (VII-B), wherein R^{11a} is —N(R″)R^{11b} or —N(R″)C(═O)R^{11b}. In some embodiments, Lipids of the Disclosure have a structure of Formula (VII-B), wherein R^{11a} is —N(R″)R^{11b}. In some embodiments, Lipids of the Disclosure have a structure of Formula (VII-B), wherein R^{11a} is —N(R″)C(═O)R^{11b}.

[1305] In some embodiments, Lipids of the Disclosure have a structure of Formula (VII-B), wherein R^{11b} is (amino)C₁-C₆ alkyl.

### Formula (VII-C)

[1306] In some embodiments, Lipids of the Disclosure have a structure of Formula (VII-C):

[chemical structure]

[1307] or a pharmaceutically acceptable salt thereof, wherein:
   [1308] A is —N(—X¹R¹)—;
   [1309] T is —X^{2a}—Y^{1a}-Q^{1a} or —X³—C(═O)OR⁴;
   [1310] (i) X¹ is optionally substituted C₂-C₃ alkylenyl;
   [1311] R is

[chemical structure]

—NR″C(O)OR²⁰, or —NR″R²¹; or
   [1312] (ii) X¹ is C₄-C₆alkylenyl, and
   [1313] R¹ is

[chemical structure]

—NR″C(O)OR²⁰, or —NR″R²¹.
[1314] Z¹ is optionally substituted C₁-C₆ alkyl;
[1315] Z^{1a} is hydrogen or optionally substituted C₁-C₆ alkyl;
[1316] R²⁰ is optionally substituted C₁-C₆alkyl;
[1317] R²¹ is —(C₂ alkylenyl)-OH;
[1318] X² and X^{2a} are independently optionally substituted C₂-C₁₄ alkylenyl or optionally substituted C₂-C₁₄ alkenylenyl;
[1319] X³ is optionally substituted C₂-C₁₄ alkylenyl or optionally substituted C₂-C₁₄ alkenylenyl;
[1320] Y¹ is a bond,

[chemical structure]

[1321] wherein the bond marked with an “*” is attached to X²;
   [1322] Y^{1a} is

[chemical structure]

[1323] wherein the bond marked with an “*” is attached to X^{2a};
[1324] wherein Y¹ and Y^{1a} are

[chemical structure]

when R¹ is

[chemical structure]

[1325] each Z² is independently H or optionally substituted C₁-C₈ alkyl;
[1326] each Z³ is independently optionally substituted C₁-C₆ alkylenyl or optionally substituted C₂-C₁₄ alkenylenyl;
[1327] Q¹ is —NR²R³, —CH(OR²)(OR³), —CR²═C(R³)(R¹²), or —C(R²)(R³)(R¹²);
[1328] Q^{1a} is —NR^{2′}R^{3′}, —CH(OR^{2′})(OR^{3′}), —CR²═C(R³)(R¹²), or —C(R^{2′})(R^{3″})(R^{12′});
[1329] wherein Q¹ is —CH(OR²)(OR³) and Q^{1a} is —CH(OR^{2′})(OR^{3′}) when R¹ is —NR″C(O)OR²⁰;
   [1330] R², R³, and R¹² are independently hydrogen, optionally substituted linear C₁-C₁₄ alkyl, optionally substituted C₂-C₁₄ alkenylenyl, or —(CH₂)ₘ-G-(CH₂)ₙH;
   [1331] R^{2′}, R^{3′}, and R^{12′} are independently hydrogen, optionally substituted linear C₁-C₁₄ alkyl, or optionally substituted C₂-C₁₄ alkenylenyl;
   [1332] X³ is optionally substituted C₂-C₁₄ alkylenyl;
   [1333] R⁴ is optionally substituted C₄-C₁₄ alkyl; and
   [1334] R″ is hydrogen or C₁-C₆ alkyl.

[1335] In some embodiments, Lipids of the Disclosure have a structure of Formula (VII-C), wherein R¹ is

[chemical structure]

wherein Z¹ is methyl and Z^{1a} is hydrogen or methyl.

[1336] In some embodiments, Lipids of the Disclosure have a structure of Formula (VII-C), wherein R¹ is

[chemical structure]

wherein Z¹ is methyl.

[1337] In some embodiments, Lipids of the Disclosure have a structure of Formula (VII-C), wherein R¹ is —NR″C(O)OR²⁰.

[1338] In some embodiments, Lipids of the Disclosure have a structure of Formula (VII-C), wherein R¹ is —NR″R²¹.

[1339] In some embodiments, Lipids of the Disclosure have a structure of Formula (VII-C), wherein R²⁰ is t-butyl or benzyl.

[1340] In some embodiments, Lipids of the Disclosure have a structure of Formula (VII-C), wherein X² and/or X^{2a} are/is optionally substituted C₂-C₁₄ alkylenyl (e.g., C₄-C₈alkylenyl, C₄, C₅, C₆, C₇, C₈ alkylenyl). In some embodiments, Lipids of the Disclosure have a structure of Formula (VII-C), wherein X² is C₄-C₈alkylenyl. In some embodiments, Lipids of the Disclosure have a structure of Formula (VII-C), wherein X^{2a} is C₄-C₈alkylenyl.

[1341] In some embodiments, Lipids of the Disclosure have a structure of Formula (VII-C), wherein Y¹ and/or Y^{1a} are/is

[chemical structure]

[1342] In some embodiments, Lipids of the Disclosure have a structure of Formula (VII-C), wherein Y¹ is

[chemical structure]

[1343] In some embodiments, Lipids of the Disclosure have a structure of Formula (VII-C), wherein Y^{1a} is

[chemical structure]

[1344] In some embodiments, Lipids of the Disclosure have a structure of Formula (VII-C), wherein Y¹ and/or Y^{1a} are/is

[chemical structure]

[1345] In some embodiments, Lipids of the Disclosure have a structure of Formula (VII-C), wherein Y¹ is

[chemical structure]

[1346] In some embodiments, Lipids of the Disclosure have a structure of Formula (VII-C), wherein Y^{1a} is

[chemical structure]

[1347] In some embodiments, Lipids of the Disclosure have a structure of Formula (VII-C), wherein Y¹ and/or Y^{1a} are/is

[chemical structure]

wherein Z³ is C₂ alkylenyl.

[1348] In some embodiments, Lipids of the Disclosure have a structure of Formula (VII-C), wherein Y¹ is

[chemical structure]

wherein Z³ is C₂ alkylenyl.

[1349] In some embodiments, Lipids of the Disclosure have a structure of Formula (VII-C), wherein Y^{1a} is

[chemical structure]

wherein Z³ is C₂ alkylenyl.

[1350] In some embodiments, Lipids of the Disclosure have a structure of Formula (VII-C), wherein Y¹ and/or Y^{1a} are/is

[chemical structure]

wherein Z³ is C₂ alkylenyl.

[1351] In some embodiments, Lipids of the Disclosure have a structure of Formula (VII-C), wherein Y¹ is

[chemical structure]

wherein Z³ is C₂ alkylenyl.

[1352] In some embodiments, Lipids of the Disclosure have a structure of Formula (VII-C), wherein Y^{1a} is

[chemical structure]

wherein Z³ is C₂ alkylenyl.

[1353] In some embodiments, Lipids of the Disclosure have a structure of Formula (VII-C), wherein Q¹ and/or Q^{1a} are/is —CH(OR²)(OR³). In some embodiments, Lipids of the Disclosure have a structure of Formula (VII-C), wherein Q^{1a} is —CH(OR²)(OR³). In some embodiments, Lipids of the Disclosure have a structure of Formula (VII-C), wherein Q¹ is —CH(OR²)(OR³).

[1354] In some embodiments, Lipids of the Disclosure have a structure of Formula (VII-C), wherein Q¹ and/or Q^{1a} are/is —C(R^{2′})(R^{3′})(R^{12′}). In some embodiments, Lipids of the Disclosure have a structure of Formula (VII-C), wherein Q¹ is —C(R^{2′})(R^{3′})(R^{12′}). In some embodiments, Lipids of the Disclosure have a structure of Formula (VII-C), wherein Q^{1a} is —C(R^{2′})(R^{3′})(R^{12′}).

[1355] In some embodiments, Lipids of the Disclosure have a structure of Formula (VII-C), wherein R², R³, R¹², R^{2′}, R^{3′}, and R^{12′} are independently hydrogen, optionally substituted linear C₁-C₁₄ alkyl (e.g., C₄-C₁₀alkyl, C₆-C₈alkyl, C₅, C₆, C₇, C₈, C₉ alkyl). In some embodiments, Lipids of the Disclosure have a structure of Formula (VII-C), wherein R² is hydrogen. In some embodiments, Lipids of the Disclosure have a structure of Formula (VII-C), wherein R³ is hydrogen. In some embodiments, Lipids of the Disclosure have a structure of Formula (VII-C), wherein R¹² is hydrogen. In some embodiments, Lipids of the Disclosure have a structure of Formula (VII-C), wherein R^{2′} is hydrogen. In some embodiments, Lipids of the Disclosure have a structure of Formula (VII-C), wherein R^{3′} is hydrogen. In some embodiments, Lipids of the Disclosure have a structure of Formula (VII-C), wherein R^{12′} is hydrogen. In some embodiments, Lipids of the Disclosure have a structure of Formula (VII-C), wherein R² is linear C₄-C₁₀alkyl. In some embodiments, Lipids of the Disclosure have a structure of Formula (VII-C), wherein R³ is linear C₄-C₁₀alkyl. In some embodiments, Lipids of the Disclosure have a structure of Formula (VII-C), wherein R¹² is linear C₄-C₁₀alkyl. In some embodiments, Lipids of the Disclosure have a structure of Formula (VII-C), wherein R^{2′} is linear C₄-C₁₀alkyl. In some embodiments, Lipids of the Disclosure have a structure of Formula (VII-C), wherein R^{3′} is linear C₄-C₁₀alkyl. In some embodiments, Lipids of the Disclosure have a structure of Formula (VII-C), wherein R^{12′} is linear C₄-C₁₀alkyl.

### Formula (I-A)

[1356] In some embodiments, Lipids of the Disclosure have a structure of Formula (I-A):

[chemical structure]

[1357] or a pharmaceutically acceptable salt thereof, wherein:
   [1358] R¹ is —OH, —R^{1a},

[chemical structure]

[1359] Z is optionally substituted C₁-C₆ alkyl;
[1360] X is optionally substituted C₂-C₆ alkylenyl;
[1361] X² and X^{2a} are independently optionally substituted C₂-C₁₄ alkylenyl;
[1362] Y¹ and Y^{1a} are independently a bond

[chemical structure]

[1363] wherein the bond marked with an “*” is attached to X² or X^{2a};
   [1364] Z² is H or optionally substituted C₁-C₈ alkyl;
   [1365] R² and R³ are independently optionally substituted C₄-C₁₄ alkyl;
   [1366] R^{2′} and R^{3′} are independently optionally substituted C₄-C₁₄ alkyl;
   [1367] R^{1a} is:

[chemical structure]

[1368] R^{2a}, R^{2b}, and R^{2c} are independently hydrogen or C₁-C₆ alkyl;
[1369] R^{3a}, R^{3b}, and R^{3c} are independently hydrogen or C₁-C₆ alkyl;
[1370] R^{4a}, R^{4b}, and R^{4c} are independently hydrogen or C₁-C₆ alkyl; and
[1371] R^{5a}, R^{5b}, and R^{5c} are independently hydrogen or C₁-C₆ alkyl.

[1372] In some embodiments, Lipids of the Disclosure have a structure of Formula (I-A), wherein R¹ is OH.

[1373] In some embodiments, Lipids of the Disclosure have a structure of Formula (I-A), wherein Y¹ and Y^{1a} are independently

[chemical structure]

In some embodiments, Lipids of the Disclosure have a structure of Formula (I-A), wherein Y¹ is

[chemical structure]

In some embodiments, Lipids of the Disclosure have a structure of Formula (I-A), wherein Y¹ is H

[chemical structure]

In some embodiments, Lipids of the Disclosure have a structure of Formula (I-A), wherein Y¹ is

[chemical structure]

In some embodiments, Lipids of the Disclosure have a structure of Formula (I-A), wherein Y¹ is

[chemical structure]

In some embodiments, Lipids of the Disclosure have a structure of Formula (I-A), wherein Y^{1a} is

[chemical structure]

In some embodiments, Lipids of the Disclosure have a structure of Formula (I-A), wherein Y^{1a} is H

[chemical structure]

In some embodiments, Lipids of the Disclosure have a structure of Formula (I-A), wherein Y^{1a} is

[chemical structure]

In some embodiments, Lipids of the Disclosure have a structure of Formula (I-A), wherein Y^{1a} is

[chemical structure]

[1374] In some embodiments, Lipids of the Disclosure have a structure of Formula (I-A), wherein Z² is H.

[1375] In some embodiments, Lipids of the Disclosure have a structure of Formula (I-A), wherein X¹ is optionally substituted C₂ or C₄ alkylenyl.

[1376] In some embodiments, Lipids of the Disclosure have a structure of Formula (I-A), wherein X² and X^{2a} are independently C₄-C₈ alkylenyl (e.g., C₆ alkylenyl). In some embodiments, Lipids of the Disclosure have a structure of Formula (I-A), wherein X² is C₆ alkylenyl. In some embodiments, Lipids of the Disclosure have a structure of Formula (I-A), wherein X^{2a} is C₆ alkylenyl.

[1377] In some embodiments, Lipids of the Disclosure have a structure of Formula (I-A), wherein R², R³, R^{2′} and R^{3′} are independently C₄-C₁₄ alkyl (e.g., C₆-C₈ alkyl, C₆, C₇, C₈ alkyl). In some embodiments, Lipids of the Disclosure have a structure of Formula (I-A), wherein R² is C₆-C₈ alkyl. In some embodiments, Lipids of the Disclosure have a structure of Formula (I-A), wherein R is C₆-C₈ alkyl. In some embodiments, Lipids of the Disclosure have a structure of Formula (I-A), wherein R^{2′} is C₆-C₈ alkyl. In some embodiments, Lipids of the Disclosure have a structure of Formula (I-A), wherein R^{3′} is C₆-C₈ alkyl.

### Formula (II)

[1378] In some embodiments, Lipids of the Disclosure have a structure of Formula (II):

[chemical structure]

[1379] or a pharmaceutically acceptable salt thereof, wherein:
   [1380] R¹ is —OH, —R^{1a}

[chemical structure]

[1381] Z¹ is optionally substituted C₁-C₆ alkyl;
[1382] X¹ is optionally substituted C₂-C₆ alkylenyl;
[1383] X² is optionally substituted C₂-C₁₄ alkylenyl;
[1384] Y¹ is a bond,

[chemical structure]

[1385] wherein the bond marked with an “*” is attached to X²;
   [1386] Z² is H or optionally substituted C₁-C₈ alkyl;
   [1387] R² and R³ are independently optionally substituted C₄-C₁₄ alkyl;
   [1388] X³ is optionally substituted C₂-C₁₄ alkylenyl;
   [1389] R⁴ is optionally substituted C₄-C₁₄ alkyl;
   [1390] R^{1a} is:

[chemical structure]

[1391] R^{2a}, R^{2b}, and R^{2c} are independently hydrogen or C₁-C₆ alkyl;
[1392] R^{3a}, R^{3b}, and R^{3c} are independently hydrogen or C₁-C₆ alkyl;
[1393] R^{4a}, R^{4b}, and R^{4c} are independently hydrogen or C₁-C₆ alkyl; and
[1394] R^{5a}, R^{5b}, and R^{5c} are independently hydrogen or C₁-C₆ alkyl.

[1395] In some embodiments, Lipids of the Disclosure have a structure of Formula (II), wherein R¹ is —OH.

[1396] In some embodiments, Lipids of the Disclosure have a structure of Formula (II), wherein X¹ is C₂-C₄ alkylenyl (e.g., C₂ alkylenyl). In some embodiments, Lipids of the Disclosure have a structure of Formula (II), wherein X¹ is C₂ alkylenyl.

[1397] In some embodiments, Lipids of the Disclosure have a structure of Formula (II), wherein X² is C₄-C₁₀ alkylenyl (e.g., C₅, C₆, C₇, C₈, C₉ alkyl).

[1398] In some embodiments, Lipids of the Disclosure have a structure of Formula (II), wherein Y¹ is

[chemical structure]

wherein Z² is hydrogen. In some embodiments, Lipids of the Disclosure have a structure of Formula (II), wherein Y is

[chemical structure]

In some embodiments, Lipids of the Disclosure have a structure of Formula (II), wherein Y¹ is

[chemical structure]

In some embodiments, Lipids of the Disclosure have a structure of Formula (II), wherein Y¹ is

[chemical structure]

In some embodiments, Lipids of the Disclosure have a structure of Formula (II), wherein Y¹ is

[chemical structure]

wherein Z² is hydrogen.

[1399] In some embodiments, Lipids of the Disclosure have a structure of Formula (II), wherein R² and R³ are independently optionally substituted C₄-C₁₀ alkyl (e.g., C₈ alkyl). In some embodiments, Lipids of the Disclosure have a structure of Formula (II), wherein R² and R³ are independently C₄-C₁₀ alkyl. In some embodiments, Lipids of the Disclosure have a structure of Formula (II), wherein R² and R³ are independently C₈ alkyl.

[1400] In some embodiments, Lipids of the Disclosure have a structure of Formula (II), wherein X³ is optionally substituted C₄-C₁₀ alkylenyl (e.g., C₅ alkylenyl). In some embodiments, Lipids of the Disclosure have a structure of Formula (II), wherein X³ is C₄-C₁₀ alkylenyl. In some embodiments, Lipids of the Disclosure have a structure of Formula (II), wherein X³ is C₅ alkylenyl.

[1401] In some embodiments, Lipids of the Disclosure have a structure of Formula (II), wherein R⁴ is optionally substituted C₆-C₁₂ alkyl (e.g., C₁₁ alkyl). In some embodiments, Lipids of the Disclosure have a structure of Formula (II), wherein R⁴ is C₆-C₁₂ alkyl. In some embodiments, Lipids of the Disclosure have a structure of Formula (II), wherein R⁴ is C₁₁ alkyl.

### Formula (III-B)

[1402] In some embodiments, Lipids of the Disclosure have a structure of Formula (III-B):

[chemical structure]

[1403] or a pharmaceutically acceptable salt thereof, wherein
   [1404] R¹ is

[chemical structure]

[1405] Z¹ is optionally substituted C₁-C₆ alkyl;
[1406] X¹ is optionally substituted C₂-C₆ alkylenyl;
[1407] X² and X^{2a} are independently optionally substituted C₂-C₁₄ alkylenyl;
[1408] Y¹ and Y^{1a} are independently

[chemical structure]

[1409] Z³ is independently optionally substituted C₂-C₆ alkylenyl;
[1410] R² and R³ are independently optionally substituted C₄-C₁₄ alkyl;
[1411] R^{2′} and R^{3′} are independently optionally substituted C₄-C₁₄ alkyl.

[1412] In some embodiments, Lipids of the Disclosure have a structure of Formula (III-B), wherein R¹ is

[chemical structure]

wherein Z¹ is methyl.

[1413] In some embodiments, Lipids of the Disclosure have a structure of Formula (II), wherein X¹ is C₂-C₄ alkylenyl (e.g., C₃ alkylenyl). In some embodiments, Lipids of the Disclosure have a structure of Formula (II), wherein X¹ is C₃ alkylenyl.

[1414] In some embodiments, Lipids of the Disclosure have a structure of Formula (II), wherein X² is C₄-C₁₀ alkylenyl (e.g., C₆ alkyl). In some embodiments, Lipids of the Disclosure have a structure of Formula (II), wherein X² is C₆ alkyl.

[1415] In some embodiments, Lipids of the Disclosure have a structure of Formula (II), wherein R² and R³ are independently optionally substituted C₄-C₁₀ alkyl (e.g., C₈ alkyl). In some embodiments, Lipids of the Disclosure have a structure of Formula (II), wherein R² and R³ are independently C₈ alkyl.

### Formula (III-C)

[1416] In some embodiments, Lipids of the Disclosure have a structure of Formula (III-C):

[chemical structure]

[1417] or a pharmaceutically acceptable salt thereof, wherein
   [1418] R²⁰ is C₁-C₆ alkylenyl-NR^{20′}C(O)OR^{20″};
   [1419] R^{20′} is hydrogen or optionally substituted C₁-C₆ alkyl;
   [1420] R^{20″} is optionally substituted C₁-C₆ alkyl, phenyl, or benzyl;
   [1421] Z¹ is optionally substituted C₁-C₆ alkyl;
   [1422] X² and X^{2a} are independently optionally substituted C₂-C₁₄ alkylenyl;
   [1423] Y¹ and Y^{1a} are independently

[chemical structure]

[1424] wherein the bond marked with an “*” is attached to X² or X^{2a};
   [1425] Z³ is independently optionally substituted C₂-C₆ alkylenyl;
   [1426] R² and R³ are independently optionally substituted C₄-C₁₄ alkyl; and
   [1427] R^{2′} and R^{3′} are independently optionally substituted C₄-C₁₄ alkyl.

[1428] In some embodiments, Lipids of the Disclosure have a structure of Formula (III-C), wherein R²⁰ is —CH₂CH₂CH₂NHC(O)O-t-butyl or —CH₂CH₂CH₂NHC(O)O-benzyl. In some embodiments, Lipids of the Disclosure have a structure of Formula (III-C), wherein R²⁰ is —CH₂CH₂CH₂NHC(O)O-t-butyl. In some embodiments, Lipids of the Disclosure have a structure of Formula (III-C), wherein R²⁰ is —CH₂CH₂CH₂NHC(O)O-benzyl.

[1429] In some embodiments, Lipids of the Disclosure have a structure of Formula (III-C), wherein X² and X^{2a} are independently C₄-C₈ alkylenyl (e.g., C₅, C₆, C₇ alkylenyl). In some embodiments, Lipids of the Disclosure have a structure of Formula (III-C), wherein X² is C₆ alkyl. In some embodiments, Lipids of the Disclosure have a structure of Formula (III-C), wherein X^{2a} is C₆ alkyl

[1430] In some embodiments, Lipids of the Disclosure have a structure of Formula (III-C), wherein Y¹ and Y^{1a} are

[chemical structure]

wherein Z³ is C₂-C₄alkylenyl (e.g., C₂ alkylenyl). In some embodiments, Lipids of the Disclosure have a structure of Formula (III-C), wherein Y¹ is

[chemical structure]

wherein Z³ is C₂-C₄alkylenyl (e.g., C₂ alkylenyl). In some embodiments, Lipids of the Disclosure have a structure of Formula (III-C), wherein Y^{1a} is

[chemical structure]

wherein Z³ is C₂-C₄alkylenyl (e.g., C₂ alkylenyl).

[1431] In some embodiments, Lipids of the Disclosure have a structure of Formula (III-C), wherein R², R³, R^{2′} and R^{3′} are independently optionally substituted C₄-C₁₀ alkyl (e.g., C₆-C₉alkyl, C₆, C₇, C₈, C₉ alkyl).

[1432] In some embodiments, Lipids of the Disclosure have a structure of Formula (III-C), wherein R² is C₆-C₉alkyl. In some embodiments, Lipids of the Disclosure have a structure of Formula (III-C), wherein R is C₆-C₉alkyl. In some embodiments, Lipids of the Disclosure have a structure of Formula (III-C), wherein R^{2′} is C₆-C₉alkyl. In some embodiments, Lipids of the Disclosure have a structure of Formula (III-C), wherein R^{3′} is C₆-C₉alkyl.

### Formula (III-D)

[1433] In some embodiments, Lipids of the Disclosure have a structure of Formula (III-D):

[chemical structure]

[1434] or a pharmaceutically acceptable salt thereof, wherein
[1435] R¹ is —OH;
[1436] X¹ is optionally substituted C₄ alkylenyl;
[1437] X² and X^{2a} are independently optionally substituted C₂-C₁₄ alkylenyl;
[1438] Y¹ and Y^{1a} are independently

[chemical structure]

[1439] Z³ is independently optionally substituted C₂-C₆ alkylenyl;
[1440] R² and R³ are independently optionally substituted C₄-C₁₄ alkyl or C₁-C₂ alkyl substituted with optionally substituted cyclopropyl; or
[1441] R^{2′} and R^{3′} are independently optionally substituted C₄-C₁₄ alkyl or C₁-C₂ alkyl substituted with optionally substituted cyclopropyl.

[1442] In some embodiments, Lipids of the Disclosure have a structure of Formula (III-D), wherein X¹ is C₄ alkylenyl.

[1443] In some embodiments, Lipids of the Disclosure have a structure of Formula (III-D), wherein X² and X^{2a} are independently optionally substituted C₄-C₁₀ alkylenyl (e.g., C₅, C₆, C₇, C₈, C₉, or C₁₀ alkylenyl). In some embodiments, Lipids of the Disclosure have a structure of Formula (III-D), wherein X² is C₄-C₁₀ alkylenyl. In some embodiments, Lipids of the Disclosure have a structure of Formula (III-D), wherein X^{2a} is C₄-C₁₀ alkylenyl.

[1444] In some embodiments, Lipids of the Disclosure have a structure of Formula (III-D), wherein Y¹ and Y^{1a} are independently

[chemical structure]

wherein Z³ is independently C₂-C₄ alkylenyl (e.g., C₂, C₄ alkylenyl).

[1445] In some embodiments, Lipids of the Disclosure have a structure of Formula (III-D), wherein R², R³, R^{2′} and R^{3′} are independently C₆-C₁₄ alkyl (e.g., C₆, C₇, C₈, C₉, C₁₀, C₁₁, C₁₂, C₁₃, or C₁₄ alkyl) or C₁-C₂ alkyl substituted with optionally substituted cyclopropyl. In some embodiments, Lipids of the Disclosure have a structure of Formula (III-D), wherein R², R³, R^{2′} and R^{3′} are independently C₆-C₁₄ alkyl (e.g., C₆, C₇, C₈, C₉, C₁₀, C₁₁, C₁₂, C₁₃, or C₁₄ alkyl). In some embodiments, Lipids of the Disclosure have a structure of Formula (III-D), wherein R² is C₆-C₁₄ alkyl. In some embodiments, Lipids of the Disclosure have a structure of Formula (III-D), wherein R³ is C₆-C₁₄ alkyl. In some embodiments, Lipids of the Disclosure have a structure of Formula (III-D), wherein R^{2′} is C₆-C₁₄ alkyl. In some embodiments, Lipids of the Disclosure have a structure of Formula (III-D), wherein R^{3′} is C₆-C₁₄ alkyl. In some embodiments, Lipids of the Disclosure have a structure of Formula (III-D), wherein R² is C₁-C₂ alkyl substituted with substituted cyclopropyl. In some embodiments, Lipids of the Disclosure have a structure of Formula (III-D), wherein R³ is C₁-C₂ alkyl substituted with substituted cyclopropyl. In some embodiments, Lipids of the Disclosure have a structure of Formula (III-D), wherein R^{2′} is C₁-C₂ alkyl substituted with substituted cyclopropyl. In some embodiments, Lipids of the Disclosure have a structure of Formula (III-D), wherein R^{3′} is C₁-C₂ alkyl substituted with substituted cyclopropyl

[1446] In some embodiments, Lipids of the Disclosure have a structure of Formula (III-D), wherein R², R³, R^{2′} and R^{3′} are independently C₁-C₂ alkyl substituted with cyclopropylene-(C₁-C⁶alkylenyl optionally substituted with cyclopropylene substituted with C₁-C₆alkyl). In some embodiments, Lipids of the Disclosure have a structure of Formula (III-D), wherein R² is C₁-C₂ alkyl substituted with cyclopropylene-(C₁-C₆alkylenyl optionally substituted with cyclopropylene substituted with C₁-C₆alkyl). In some embodiments, Lipids of the Disclosure have a structure of Formula (III-D), wherein R³ is C₁-C₂ alkyl substituted with cyclopropylene-(C₁-C⁶alkylenyl optionally substituted with cyclopropylene substituted with C₁-C₆alkyl). In some embodiments, Lipids of the Disclosure have a structure of Formula (III-D), wherein R^{2′} is C₁-C₂ alkyl substituted with cyclopropylene-(C₁-C⁶alkylenyl optionally substituted with cyclopropylene substituted with C₁-C₆alkyl). In some embodiments, Lipids of the Disclosure have a structure of Formula (III-D), wherein R^{3′} is C₁-C₂ alkyl substituted with cyclopropylene-(C₁-C⁶alkylenyl optionally substituted with cyclopropylene substituted with C₁-C₆alkyl).

### Formula (III-E)

[1447] In some embodiments, Lipids of the Disclosure have a structure of Formula (III-E):

[chemical structure]

[1448] or a pharmaceutically acceptable salt thereof, wherein
   [1449] R′ is —OH;
   [1450] X¹ is branched C₂-C₈ alkylenyl
   [1451] X² and X^{2a} are independently optionally substituted C₂-C₁₄ alkylenyl;
   [1452] Y¹ and Y^{1a} are independently

[chemical structure]

[1453] Z³ is independently optionally substituted C₂-C₆ alkylenyl;
[1454] R² and R³ are independently optionally substituted C₄-C₁₄ alkyl;
[1455] R^{2′} and R^{3′} are independently optionally substituted C₄-C₁₄ alkyl.

[1456] In some embodiments, Lipids of the Disclosure have a structure of Formula (III-E), wherein X¹ is branched C₆ alkylenyl.

[1457] In some embodiments, Lipids of the Disclosure have a structure of Formula (III-E), wherein X² and X^{2a} are independently C₄-C₁₀ alkylenyl (e.g., C₆, C₇, C₈ alkylenyl). In some embodiments, Lipids of the Disclosure have a structure of Formula (III-E), wherein X² is C₄-C₁₀ alkylenyl. In some embodiments, Lipids of the Disclosure have a structure of Formula (III-E), wherein X^{2a} is C₄-C₁₀ alkylenyl

[1458] In some embodiments, Lipids of the Disclosure have a structure of Formula (III-E), wherein Y¹ and Y^{1a} are

[chemical structure]

wherein Z³ is independently optionally substituted C₂ alkylenyl. In some embodiments, Lipids of the Disclosure have a structure of Formula (III-E), wherein Y¹ is

[chemical structure]

wherein Z³ is independently optionally substituted C₂ alkylenyl. In some embodiments, Lipids of the Disclosure have a structure of Formula (III-E), wherein Y^{1a} is

[chemical structure]

wherein Z³ is independently optionally substituted C₂ alkylenyl.

[1459] In some embodiments, Lipids of the Disclosure have a structure of Formula (III-E), wherein R², R³, R^{2′} and R^{3′} are independently C₆-C₁₂ alkyl (e.g., C₉ alkyl) or C₄-C₁₀ alkyl (e.g., C₄, C₆ alkyl) optionally substituted with C₂-C₈alkenylene (e.g., C₄, C₆ alkenylene). In some embodiments, Lipids of the Disclosure have a structure of Formula (III-E), wherein R² is C₆-C₁₂ alkyl. In some embodiments, Lipids of the Disclosure have a structure of Formula (III-E), wherein R³ is C₆-C₁₂ alkyl. In some embodiments, Lipids of the Disclosure have a structure of Formula (III-E), wherein R^{2′} is C₆-C₁₂ alkyl. In some embodiments, Lipids of the Disclosure have a structure of Formula (III-E), wherein R^{3′} is C₆-C₁₂ alkyl. In some embodiments, Lipids of the Disclosure have a structure of Formula (III-E), wherein R² is C₄-C₁₀ alkyl optionally substituted with C₂-C₈alkenylene. In some embodiments, Lipids of the Disclosure have a structure of Formula (III-E), wherein R³ is C₄-C₁₀ alkyl optionally substituted with C₂-C₈alkenylene. In some embodiments, Lipids of the Disclosure have a structure of Formula (III-E), wherein R^{2′} is C₄-C₁₀ alkyl optionally substituted with C₂-C₈alkenylene. In some embodiments, Lipids of the Disclosure have a structure of Formula (III-E), wherein R^{3′} is C₄-C₁₀ alkyl optionally substituted with C₂-C₈alkenylene.

### Formula (III-F)

[1460] In some embodiments, Lipids of the Disclosure have a structure of Formula (III-F):

[chemical structure]

[1461] or a pharmaceutically acceptable salt thereof, wherein
[1462] R¹ is —OH;
[1463] X¹ is optionally substituted C₂-C₆ alkylenyl;
[1464] X² and X^{2a} are independently optionally substituted C₂-C₁₄ alkylenyl;
[1465] each of Y¹ and Y^{1a} is a bond;
[1466] R² and R³ are independently optionally substituted C₄-C₁₄ alkyl; and
[1467] R^{2′} and R^{3′} are independently optionally substituted C₄-C₁₄ alkyl.

[1468] In some embodiments, Lipids of the Disclosure have a structure of Formula (III-E), wherein X¹ is C₄ alkylenyl.

[1469] In some embodiments, Lipids of the Disclosure have a structure of Formula (III-E), wherein X² and X^{2a} are independently C₄-C₁₀ alkylenyl (e.g., C₆-C₈ alkylenyl, C₆, C₇, C₈ alkylenyl). In some embodiments, Lipids of the Disclosure have a structure of Formula (III-E), wherein X² is C₄-C₁₀ alkylenyl. In some embodiments, Lipids of the Disclosure have a structure of Formula (III-E), wherein X^{2a} is C₄-C₁₀ alkylenyl.

[1470] In some embodiments, Lipids of the Disclosure have a structure of Formula (III-E), wherein R², R³, R^{2′} and R^{3′} are independently C₆-C₁₀ alkyl (e.g., C₇. C₈ alkyl). In some embodiments, Lipids of the Disclosure have a structure of Formula (III-E), wherein R² is C₆-C₁₀ alkyl. In some embodiments, Lipids of the Disclosure have a structure of Formula (III-E), wherein R³ is C₆-C₁₀ alkyl. In some embodiments, Lipids of the Disclosure have a structure of Formula (III-E), wherein R^{2′} is C₆-C₁₀ alkyl. In some embodiments, Lipids of the Disclosure have a structure of Formula (III-E), wherein R^{3′} is C₆-C₁₀ alkyl.

### Formula (VIII-B)

[1471] In some embodiments, Lipids of the Disclosure have a structure of Formula (VIII-B):

[chemical structure]

[1472] or a pharmaceutically acceptable salt thereof, wherein:
   [1473] X¹ is a bond,
   [1474] R¹ is C₁-C₆ alkyl,
   [1475] X² is is C₂-C₆ alkylenyl,
   [1476] X^{2a} is C₂-C₁₄ alkylenyl,
   [1477] wherein X² or X^{2a} is substituted with OH or C₁₋₄alkylenyl-OH,
   [1478] Y¹ is

[chemical structure]

[1479] wherein the bond marked with an “*” is attached to X²;
   [1480] Y^{1a} is

[chemical structure]

[1481] wherein the bond marked with an “*” is attached to X^{2a};
   [1482] each Z³ is independently optionally substituted C₁-C₆ alkylenyl or optionally substituted C₂-C₁₄ alkenylenyl;
   [1483] Q¹ is —C(R²)(R³)(R¹²);
   [1484] Q^{1a} is —C(R^{2′})(R^{3′})(R^{12′});
   [1485] R², R³, and R¹² are independently hydrogen, optionally substituted C₁-C₁₄ alkyl, or optionally substituted C₂-C₁₄ alkenylenyl, and
   [1486] R^{2′}, R^{3′}, and R^{12′} are independently hydrogen, optionally substituted C₁-C₁₄ alkyl, or optionally substituted C₂-C₁₄ alkenylenyl.

[1487] In some embodiments, Lipids of the Disclosure have a structure of Formula (VIII-B), wherein R¹ is methyl.

[1488] In some embodiments, Lipids of the Disclosure have a structure of Formula (VIII-B), wherein X² is C₄, C₅, or C₆ alkylenyl.

[1489] In some embodiments, Lipids of the Disclosure have a structure of Formula (VIII-B), wherein X^{2a} is C₄-C₈ alkylenyl (e.g., C₅, C₆, or C₇ alkylenyl).

[1490] In some embodiments, Lipids of the Disclosure have a structure of Formula (VIII-B), wherein Y¹ is

[chemical structure]

### and Y^{1a} is

[chemical structure]

In some embodiments, Lipids of the Disclosure have a structure of Formula (VIII-B), wherein Y¹ is

[chemical structure]

In some embodiments, Lipids of the Disclosure have a structure of Formula (VIII-B), wherein Y¹ is

[chemical structure]

In some embodiments, Lipids of the Disclosure have a structure of Formula (VIII-B), wherein Y^{1a} is

[chemical structure]

In some embodiments, Lipids of the Disclosure have a structure of Formula (VIII-B), wherein Y^{1a} is

[chemical structure]

[1492] In some embodiments, Lipids of the Disclosure have a structure of Formula (VIII-B), wherein R², R³, R¹², R^{2′}, R^{3′}, and R^{12′} are independently hydrogen or C₅-C₁₂ alkyl (e.g., C₆, C₇, C₈, C₉, C₁₀, C₁₁ alkyl). In some embodiments, Lipids of the Disclosure have a structure of Formula (VIII-B), wherein R² is hydrogen. In some embodiments, Lipids of the Disclosure have a structure of Formula (VIII-B), wherein R³ is hydrogen. In some embodiments, Lipids of the Disclosure have a structure of Formula (VIII-B), wherein R^{2′} is hydrogen. In some embodiments, Lipids of the Disclosure have a structure of Formula (VIII-B), wherein R^{3′} is hydrogen. In some embodiments, Lipids of the Disclosure have a structure of Formula (VIII-B), wherein R² is C₅-C₁₂ alkyl. In some embodiments, Lipids of the Disclosure have a structure of Formula (VIII-B), wherein R³ is C₅-C₁₂ alkyl. In some embodiments, Lipids of the Disclosure have a structure of Formula (VIII-B), wherein R^{2′} is C₅-C₁₂ alkyl. In some embodiments, Lipids of the Disclosure have a structure of Formula (VIII-B), wherein R^{3′} is C₅-C₁₂ alkyl.

### Formula (IV)

[1493] In some embodiments, Lipids of the Disclosure have a structure of Formula (IV):

[chemical structure]

[1494] or a pharmaceutically acceptable salt thereof, wherein
[1495] R¹ is —OH, —R^{1a}
[1496] X¹ is optionally substituted C₂-C₆ alkylenyl;
[1497] (i) Y¹ is

[chemical structure]

[1498] Z³ is optionally substituted C₂-C₆ alkylenyl; and
[1499] R² and R³ are independently optionally substituted C₄-C₁₄ alkyl;
[1500] X² and X³ are C₅ alkylenyl; or
[1501] (ii) Y¹ is a bond
   [1502] R² and R³ are independently C₄-C₇alkyl;
   [1503] X² is optionally substituted C₂-C₁₄ alkylenyl;
   [1504] X³ is optionally substituted C₅ alkylenyl;
[1505] R⁴ is optionally substituted C₄-C₁₄ alkyl;
[1506] R^{1a} is:

[chemical structure]

[1507] R^{2a}, R^{2b} and R^{2c} are independently hydrogen and C₁-C₆ alkyl;
[1508] R^{3a}, R^{3b}, and R^{3c} are independently hydrogen and C₁-C₆ alkyl;
[1509] R^{4a}, R^{4b}, and R^{4c} are independently hydrogen and C₁-C₆ alkyl; and
[1510] R^{5a}, R^{5b}, and R^{5c} are independently hydrogen and C₁-C₆ alkyl.

[1511] In some embodiments, Lipids of the Disclosure have a structure of Formula (IV), wherein R¹ is OH.

[1512] In some embodiments, Lipids of the Disclosure have a structure of Formula (IV), wherein X¹ is C₂ alkylenyl.

[1513] In some embodiments, Lipids of the Disclosure have a structure of Formula (IV), wherein Y¹ is

[chemical structure]

wherein Z³ is C₂ alkylenyl.

[1514] In some embodiments, Lipids of the Disclosure have a structure of Formula (IV), wherein R² and R³ are independently C₆-C₁₂ alkyl (C₇, C₈, C₉, C₁₀, C₁₁ alkyl). In some embodiments, Lipids of the Disclosure have a structure of Formula (IV), wherein R² is C₆-C₁₂ alkyl. In some embodiments, Lipids of the Disclosure have a structure of Formula (IV), wherein R³ is C₆-C₁₂ alkyl.

[1515] In some embodiments, Lipids of the Disclosure have a structure of Formula (IV), wherein Y¹ is a bond.

[1516] In some embodiments, Lipids of the Disclosure have a structure of Formula (IV), wherein R² and R³ are C₄-C₇alkyl (e.g., C₇alkyl). In some embodiments, Lipids of the Disclosure have a structure of Formula (IV), wherein R² is C₄-C₇alkyl. In some embodiments, Lipids of the Disclosure have a structure of Formula (IV), wherein R³ is C₄-C₇alkyl.

[1517] In some embodiments, Lipids of the Disclosure have a structure of Formula (IV), wherein X² is C₆-C₁₂ alkylenyl (e.g., C₇, C₈, C₉, C₁₀ alkylenyl).

### Formula (VI)

[1518] In some embodiments, Lipids of the Disclosure have a structure of Formula (VI):

[chemical structure]

[1519] or a pharmaceutically acceptable salt thereof, wherein
   [1520] R¹ is —OH,

[chemical structure]

[1521] Z¹ is optionally substituted C₁-C₆ alkyl;
[1522] X¹ is optionally substituted C₂-C₆ alkylenyl;
[1523] X² is optionally substituted C₂-C₁₄ alkylenyl;
[1524] X³ is optionally substituted C₂-C₁₄ alkylenyl;
[1525] Y¹ is

[chemical structure]

[1526] wherein the bond marked with an “*” is attached to X²;
   [1527] Z² is H or optionally substituted C₁-C₈ alkyl;
   [1528] R² and R³ are independently optionally substituted C₃-C₁₄ alkyl; and
   [1529] (i) R⁴ is linear C₄-C₁₄ alkyl; or
   [1530] (ii) R⁴ is linear C₄-C₁₄ alkyl substituted by 1 or 2 isopropyl groups.

[1531] In some embodiments, Lipids of the Disclosure have a structure of Formula (VI), wherein R¹ is —OH.

[1532] In some embodiments, Lipids of the Disclosure have a structure of Formula (VI), wherein R¹ is

[chemical structure]

wherein Z¹ is C₁-C₆ alkyl (e.g., methyl).

[1533] In some embodiments, Lipids of the Disclosure have a structure of Formula (VI), wherein X¹ is optionally substituted C₂-C₄ alkylenyl (e.g., C₂, C₃, C₄ alkylenyl). In some embodiments, Lipids of the Disclosure have a structure of Formula (VI), wherein X¹ is C₂-C₄ alkylenyl.

[1534] In some embodiments, Lipids of the Disclosure have a structure of Formula (VI), wherein X² is C₄-C₈ alkylenyl (e.g., C₅, C₆, C₇, C₈ alkylenyl).

[1535] In some embodiments, Lipids of the Disclosure have a structure of Formula (VI), wherein X³ is C₄-C₈ alkylenyl (e.g., C₅, C₆, C₇, C₈ alkylenyl).

[1536] In some embodiments, Lipids of the Disclosure have a structure of Formula (VI), wherein Y¹ is

[chemical structure]

[1537] In some embodiments, Lipids of the Disclosure have a structure of Formula (VI), wherein Y¹ is

[chemical structure]

[1538] In some embodiments, Lipids of the Disclosure have a structure of Formula (VI), wherein Y¹ is

[chemical structure]

wherein Z² is hydrogen.

[1539] In some embodiments, Lipids of the Disclosure have a structure of Formula (VI), wherein R² and R³ are independently C₃-C₈ alkyl (e.g., C₃ alkyl, C₅ alkyl, C₈ alkyl). In some embodiments, Lipids of the Disclosure have a structure of Formula (VI), wherein R² is C₃-C₈ alkyl. In some embodiments, Lipids of the Disclosure have a structure of Formula (VI), wherein R³ is C₃-C₈ alkyl.

[1540] In some embodiments, Lipids of the Disclosure have a structure of Formula (VI), wherein R⁴ is linear C₈-C₁₄ alkyl (e.g., C₁₀, C₁₁, C₁₂ alkyl).

[1541] In some embodiments, Lipids of the Disclosure have a structure of Formula (VI), wherein R⁴ is linear C₄-C₈ alkyl (e.g., C₄alkyl) substituted by 1 or 2 isopropyl groups.

### Formula (X)

[1542] In some embodiments, Lipids of the Disclosure have a structure of Formula (X):

[chemical structure]

[1543] or a pharmaceutically acceptable salt thereof, wherein
[1544] each cc is independently selected from 3 to 9;
   [1545] R^{xx} is selected from hydrogen and optionally substituted C₁-C₆ alkyl; and
   [1546] (i) ee is 1,
      [1547] each dd is independently selected from 1 to 4; and
   [1548] each R^{ww} is independently selected from the group consisting of C₄-C₁₄ alkyl, branched C₄-C₁₂ alkenyl, C₄-C₁₂ alkenyl comprising at least two double bonds, and C₉-C₁₂ alkenyl, wherein any —(CH₂)₂— of the C₄-C₁₄ alkyl can be optionally replaced with C₂-C₆ cycloalkylenyl;
   [1549] (ii) ee is 0,
      [1550] each dd is 1; and
      [1551] each R^{ww} is linear C₄-C₁₂ alkyl.

[1552] In some embodiments, Lipids of the Disclosure have a structure of Formula (X), wherein R^{xx} is H. In some embodiments, Lipids of the Disclosure have a structure of Formula (X), wherein R^{xx} is optionally substituted C₁-C₆ alkyl. In some embodiments, Lipids of the Disclosure have a structure of Formula (X), wherein R^{xx} is C₁ alkyl. In some embodiments, Lipids of the Disclosure have a structure of Formula (X), wherein R^{xx} is C₂alkyl. In some embodiments, Lipids of the Disclosure have a structure of Formula (X), wherein R^{xx} is C₃ alkyl. In some embodiments, Lipids of the Disclosure have a structure of Formula (X), wherein R^{xx} is C₄ alkyl. In some embodiments, Lipids of the Disclosure have a structure of Formula (X), wherein R^{xx} is C⁵ alkyl. In some embodiments, Lipids of the Disclosure have a structure of Formula (X), wherein R^{xx} is C₆ alkyl.

[1553] In some embodiments, Lipids of the Disclosure have a structure of Formula (X), wherein each R^{ww} is independently selected from the group consisting of C₄-C₁₄ alkyl, branched C₄-C₁₂ alkenyl, C₄-C₁₂ alkenyl comprising at least two double bonds, and C₉-C₁₂ alkenyl, wherein any —(CH₂)₂— of the C₄-C₁₄ alkyl can be optionally replaced with C₂-C₆ cycloalkylenyl. In some embodiments, Lipids of the Disclosure have a structure of Formula (X), wherein each R^{ww} is C₄-C₁₄ alkyl, wherein any —(CH₂)₂— of the C₄-C₁₄ alkyl can be optionally replaced with C₂-C₆ cycloalkylenyl. In some embodiments, Lipids of the Disclosure have a structure of Formula (X), wherein each R^{ww} is C₄-C₁₄ alkyl, wherein any —(CH₂)₂— of the C₄-C₁₄ alkyl can be optionally replaced with cyclopropylene. In some embodiments, Lipids of the Disclosure have a structure of Formula (X), wherein each R^{ww} is branched C₄-C₁₂ alkenyl. In some embodiments, Lipids of the Disclosure have a structure of Formula (X), wherein each R^{ww} is C₄-C₁₂ alkenyl comprising at least two double bonds. In some embodiments, Lipids of the Disclosure have a structure of Formula (X), wherein each R^{ww} is C₉-C₁₂ alkenyl. In some embodiments, Lipids of the Disclosure have a structure of Formula (X), wherein each R^{ww} is linear C₄-C₁₂ alkyl. In some embodiments, Lipids of the Disclosure have a structure of Formula (X), wherein each R^{ww} is independently selected from the group consisting of C₆-C₁₄ alkyl, branched C₈-C₁₂ alkenyl, C₈-C₁₂ alkenyl comprising at least two double bonds, and C₉-C₁₂ alkenyl, wherein any —(CH₂)₂— of the C₆-C₁₄ alkyl can be optionally replaced with cyclopropylene. In some embodiments, Lipids of the Disclosure have a structure of Formula (X), wherein each R^{ww} is C₆-C₁₄ alkyl, wherein any —(CH₂)₂— of the C₆-C₁₄ alkyl can be optionally replaced with cyclopropylene. In some embodiments, Lipids of the Disclosure have a structure of Formula (X), wherein each R^{ww} is branched C₈-C₁₂ alkenyl, e.g., (linear or branched C₃-C₅ alkylenyl)-(branched C₅-C₇alkenyl), e.g., (branched C₅ alkylenyl)-(branched C₅ alkenyl), e.g.,

[chemical structure]

[1554] In some embodiments, Lipids of the Disclosure have a structure of Formula (X), wherein each R^{ww} is C₈-C₁₂ alkenyl comprising at least two double bonds. In some embodiments, Lipids of the Disclosure have a structure of Formula (X), wherein each R^{ww} is C₉-C₁₂ alkenyl.

[1555] In some embodiments, Lipids of the Disclosure have a structure of Formula (X), wherein each R^{ww} is independently selected from the group consisting of C₆-C₁₄ alkyl (e.g., C₆, C₈, C₉, C₁₀, C₁₁, C₁₃ alkyl), wherein any —(CH₂)₂— of the C₆-C₁₄ alkyl can be optionally replaced with cyclopropylene.

[1556] In some embodiments, Lipids of the Disclosure have a structure of Formula (X), wherein each R^{ww} is independently branched C₈-C₁₂ alkenyl (e.g., branched C₁₀ alkenyl).

[1557] In some embodiments, Lipids of the Disclosure have a structure of Formula (X), wherein each R^{ww} is independently C₈-C₁₂ alkenyl comprising at least two double bonds (e.g., C₉ or C₁₀ alkenyl comprising two double bonds).

[1558] In some embodiments, Lipids of the Disclosure have a structure of Formula (X), wherein each R^{ww} is independently (C₁ alkylenyl)-(cyclopropylene-C₆ alkyl) or (C₂alkylenyl)-(cyclopropylene-C₂ alkyl). In some embodiments, Lipids of the Disclosure have a structure of Formula (X), wherein each R^{ww} is independently (C₁ alkylenyl)-(cyclopropylene-C₆ alkyl). In some embodiments, Lipids of the Disclosure have a structure of Formula (X), wherein each R^{ww} is independently (C₂ alkylenyl)-(cyclopropylene-C₂ alkyl).

[1559] In some embodiments, Lipids of the Disclosure have a structure of Formula (X), wherein each R^{ww} is C₄ alkyl. In some embodiments, Lipids of the Disclosure have a structure of Formula (X), wherein each R^{ww} is C₅ alkyl. In some embodiments, Lipids of the Disclosure have a structure of Formula (X), wherein each R^{ww} is C₆ alkyl. In some embodiments, Lipids of the Disclosure have a structure of Formula (X), wherein each R^{ww} is C₇ alkyl. In some embodiments, Lipids of the Disclosure have a structure of Formula (X), wherein each R^{ww} is C₈ alkyl. In some embodiments, Lipids of the Disclosure have a structure of Formula (X), wherein each R^{ww} is C₉ alkyl. In some embodiments, Lipids of the Disclosure have a structure of Formula (X), wherein each R^{ww} is C₁₀ alkyl. In some embodiments, Lipids of the Disclosure have a structure of Formula (X), wherein each R^{ww} is C₁₁ alkyl. In some embodiments, Lipids of the Disclosure have a structure of Formula (X), wherein each R^{ww} is C₁₂ alkyl. In some embodiments, Lipids of the Disclosure have a structure of Formula (X), wherein each R^{ww} is C₁₃ alkyl. In some embodiments, Lipids of the Disclosure have a structure of Formula (X), wherein each R^{ww} is C₁₄ alkyl.

[1560] In some embodiments, Lipids of the Disclosure have a structure of Formula (X), wherein each R^{ww} is C₉ alkenyl. In some embodiments, Lipids of the Disclosure have a structure of Formula (X), wherein each R^{ww} is C₁₀ alkenyl. In some embodiments, Lipids of the Disclosure have a structure of Formula (X), wherein each R^{ww} is C₁₁ alkenyl. In some embodiments, Lipids of the Disclosure have a structure of Formula (X), wherein each R^{ww} is C₁₂ alkenyl.

[1561] In some embodiments, Lipids of the Disclosure have a structure of Formula (X), wherein each R^{ww} is C₈ alkenyl comprising at least two double bonds. In some embodiments, Lipids of the Disclosure have a structure of Formula (X), wherein each R^{ww} is C₉ alkenyl comprising at least two double bonds. In some embodiments, Lipids of the Disclosure have a structure of Formula (X), wherein each R^{ww} is C₁₀ alkenyl comprising at least two double bonds. In some embodiments, Lipids of the Disclosure have a structure of Formula (X), wherein each R^{ww} is C₁₁ alkenyl comprising at least two double bonds. In some embodiments, Lipids of the Disclosure have a structure of Formula (X), wherein each R^{ww} is C₁₂ alkenyl comprising at least two double bonds. In some embodiments, Lipids of the Disclosure have a structure of Formula (X), wherein each R^{ww} is C₁₃ alkenyl comprising at least two double bonds. In some embodiments, Lipids of the Disclosure have a structure of Formula (X), wherein each R^{ww} is C₁₄ alkenyl comprising at least two double bonds.

[1562] In some embodiments, Lipids of the Disclosure have a structure of Formula (X), wherein each R^{ww} is C₉ alkyl, wherein one —(CH₂)₂— of the C₉ alkyl is replaced with C₂-C₆ cycloalkylenyl. In some embodiments, Lipids of the Disclosure have a structure of Formula (X), wherein each R^{ww} is C₉ alkyl, wherein one —(CH₂)₂— of the C₉ alkyl is replaced with cyclopropylene. In some embodiments, Lipids of the Disclosure have a structure of Formula (X), wherein each R^{ww} is C₉ alkyl, wherein two —(CH₂)₂— of the C₉ alkyl are replaced with C₂-C₆ cycloalkylenyl. In some embodiments, Lipids of the Disclosure have a structure of Formula (X), wherein each R^{ww} is C₉ alkyl, wherein two —(CH₂)₂— of the C₉ alkyl are replaced with cyclopropylene.

[1563] In some embodiments, Lipids of the Disclosure have a structure of Formula (X), wherein each R^{ww} is linear C₄ alkyl. In some embodiments, Lipids of the Disclosure have a structure of Formula (X), wherein each R^{ww} is linear C₅ alkyl. In some embodiments, Lipids of the Disclosure have a structure of Formula (X), wherein each R^{ww} is linear C₆ alkyl. In some embodiments, Lipids of the Disclosure have a structure of Formula (X), wherein each R^{ww} is linear C₇ alkyl. In some embodiments, Lipids of the Disclosure have a structure of Formula (X), wherein each R^{ww} is linear C₈ alkyl. In some embodiments, Lipids of the Disclosure have a structure of Formula (X), wherein each R^{ww} is linear C₉ alkyl. In some embodiments, Lipids of the Disclosure have a structure of Formula (X), wherein each R^{ww} is linear C₁₀ alkyl. In some embodiments, Lipids of the Disclosure have a structure of Formula (X), wherein each R^{ww} is linear C₁₁ alkyl. In some embodiments, Lipids of the Disclosure have a structure of Formula (X), wherein each R^{ww} is linear C₁₂ alkyl. In some embodiments, Lipids of the Disclosure have a structure of Formula (X), wherein each R^{ww} is linear C₁₃ alkyl. In some embodiments, Lipids of the Disclosure have a structure of Formula (X), wherein each R^{ww} is linear C₁₄ alkyl.

[1564] In some embodiments, Lipids of the Disclosure have a structure of Formula (X), wherein each R^{ww} is branched C₈ alkenyl. In some embodiments, Lipids of the Disclosure have a structure of Formula (X), wherein each R^{ww} is branched C₉ alkenyl. In some embodiments, Lipids of the Disclosure have a structure of Formula (X), wherein each R^{ww} is branched C₁₀ alkenyl. In some embodiments, Lipids of the Disclosure have a structure of Formula (X), wherein each R^{ww} is branched C₁₁ alkenyl. In some embodiments, Lipids of the Disclosure have a structure of Formula (X), wherein each R^{ww} is branched C₁₂ alkenyl.

[1565] In some embodiments, Lipids of the Disclosure have a structure of Formula (X), wherein each cc is independently selected from 3 to 7. In some embodiments, Lipids of the Disclosure have a structure of Formula (X), wherein each cc is 3. In some embodiments, Lipids of the Disclosure have a structure of Formula (X), wherein each cc is 4. In some embodiments, Lipids of the Disclosure have a structure of Formula (X), wherein each cc is 5. In some embodiments, Lipids of the Disclosure have a structure of Formula (X), wherein each cc is 6. In some embodiments, Lipids of the Disclosure have a structure of Formula (X), wherein each cc is 7. In some embodiments, Lipids of the Disclosure have a structure of Formula (X), wherein each cc is 8. In some embodiments, Lipids of the Disclosure have a structure of Formula (X), wherein each cc is 9.

[1566] In some embodiments, Lipids of the Disclosure have a structure of Formula (X), wherein each dd is independently selected from 1 to 4. In some embodiments, Lipids of the Disclosure have a structure of Formula (X), wherein each dd is 1. In some embodiments, Lipids of the Disclosure have a structure of Formula (X), wherein each dd is 2. In some embodiments, Lipids of the Disclosure have a structure of Formula (X), wherein each dd is 3. In some embodiments, Lipids of the Disclosure have a structure of Formula (X), wherein each dd is 4.

[1567] In some embodiments, Lipids of the Disclosure have a structure of Formula (X), wherein ee is 1.

[1568] In some embodiments, Lipids of the Disclosure have a structure of Formula (X), wherein ee is 0.

### Formula (X-A)

[1569] In some embodiments, Lipids of the Disclosure have a structure of Formula (X), wherein the Lipids of the Disclosure have a structure of Formula (X-A):

[chemical structure]

[1570] or a pharmaceutically acceptable salt thereof, wherein
[1571] each cc is independently selected from 3 to 7;
   [1572] each dd is independently selected from 1 to 4;
   [1573] R^{xx} is selected from hydrogen and optionally substituted C₁-C₆ alkyl; and
   [1574] each R^{ww} is independently selected from the group consisting of C₄-C₁₄ alkyl or (linear or branched C₃-C₅ alkylenyl)-(branched C₅-C₇alkenyl).

[1575] In some embodiments, Lipids of the Disclosure have a structure of Formula (X-A), wherein R^{xx} is hydrogen. In some embodiments, Lipids of the Disclosure have a structure of Formula (X-A), wherein R^{xx} is C₁ alkyl. In some embodiments, Lipids of the Disclosure have a structure of Formula (X-A), wherein R^{xx} is C₂ alkyl. In some embodiments, Lipids of the Disclosure have a structure of Formula (X-A), wherein R^{xx} is C₃ alkyl. In some embodiments, Lipids of the Disclosure have a structure of Formula (X-A), wherein R^{xx} is C₄ alkyl. In some embodiments, Lipids of the Disclosure have a structure of Formula (X-A), wherein R^{xx} is C₅ alkyl. In some embodiments, Lipids of the Disclosure have a structure of Formula (X-A), wherein R^{xx} is C₆ alkyl.

[1576] In some embodiments, Lipids of the Disclosure have a structure of Formula (X-A), wherein each cc is 4, 5, 6, or 7. In some embodiments, Lipids of the Disclosure have a structure of Formula (X-A), wherein each cc is 3. In some embodiments, Lipids of the Disclosure have a structure of Formula (X-A), wherein each cc is 4. In some embodiments, Lipids of the Disclosure have a structure of Formula (X-A), wherein each cc is 5. In some embodiments, Lipids of the Disclosure have a structure of Formula (X-A), wherein each cc is 6. In some embodiments, Lipids of the Disclosure have a structure of Formula (X-A), wherein each cc is 7.

[1577] In some embodiments, Lipids of the Disclosure have a structure of Formula (X-A), wherein each dd is 1 or 3. In some embodiments, Lipids of the Disclosure have a structure of Formula (X-A), wherein each dd is 1. In some embodiments, Lipids of the Disclosure have a structure of Formula (X-A), wherein each dd is 2. In some embodiments, Lipids of the Disclosure have a structure of Formula (X-A), wherein each dd is 3. In some embodiments, Lipids of the Disclosure have a structure of Formula (X-A), wherein each dd is 4.

[1578] In some embodiments, Lipids of the Disclosure have a structure of Formula (X-A), wherein each R^{ww} is C₄-C₁₄ alkyl. In some embodiments, Lipids of the Disclosure have a structure of Formula (X-A), wherein each R^{ww} is C₄ alkyl. In some embodiments, Lipids of the Disclosure have a structure of Formula (X-A), wherein each R^{ww} is C₅ alkyl. In some embodiments, Lipids of the Disclosure have a structure of Formula (X-A), wherein each R^{ww} is C₆ alkyl. In some embodiments, Lipids of the Disclosure have a structure of Formula (X-A), wherein each R^{ww} is C₇ alkyl. In some embodiments, Lipids of the Disclosure have a structure of Formula (X-A), wherein each R^{ww} is C₈ alkyl. In some embodiments, Lipids of the Disclosure have a structure of Formula (X-A), wherein each R^{ww} is C₉ alkyl. In some embodiments, Lipids of the Disclosure have a structure of Formula (X-A), wherein each R^{ww} is C₁₀ alkyl. In some embodiments, Lipids of the Disclosure have a structure of Formula (X-A), wherein each R^{ww} is C₁₁ alkyl.

[1579] In some embodiments, Lipids of the Disclosure have a structure of Formula (X-A), wherein each R^{ww} is C₁₂ alkyl. In some embodiments, Lipids of the Disclosure have a structure of Formula (X-A), wherein each R^{ww} is C₁₃ alkyl. In some embodiments, Lipids of the Disclosure have a structure of Formula (X-A), wherein each R^{ww} is C₁₄ alkyl.

[1580] In some embodiments, Lipids of the Disclosure have a structure of Formula (X-A), wherein each R^{ww} is (linear or branched C₃-C₅ alkylenyl)-(branched C₅-C₇alkenyl), e.g., (branched C₅ alkylenyl)-(branched C₅ alkenyl), e.g.,

[chemical structure]

[1581] In some embodiments, Lipids of the Disclosure comprise an acyclic core. In some embodiments, Lipids of the Disclosure are selected from any lipid in Table (I) below or a pharmaceutically acceptable salt thereof:

TABLE (I)
Non-Limiting Examples of Ionizable Lipids with an Acyclic Core

| Structure | Compound No. |
|---|---|
| [chemical structure] | 1 |
| [chemical structure] | 2 |
| [chemical structure] | 3 |
| [chemical structure] | 4 |
| [chemical structure] | 5 |
| [chemical structure] | 6 |
| [chemical structure] | 7 |
| [chemical structure] | 8 |
| [chemical structure] | 9 |
| [chemical structure] | 10 |
| [chemical structure] | 11 |
| [chemical structure] | 13 |
| [chemical structure] | 14 |
| [chemical structure] | 15 |
| [chemical structure] | 16 |
| [chemical structure] | 17 |
| [chemical structure] | 18 |
| [chemical structure] | 19 |
| [chemical structure] | 20 |
| [chemical structure] | 21 |
| [chemical structure] | 22 |
| [chemical structure] | 23 |
| [chemical structure] | 24 |
| [chemical structure] | 25 |
| [chemical structure] | 26 |
| [chemical structure] | 27 |
| [chemical structure] | 28 |
| [chemical structure] | 29 |
| [chemical structure] | 30 |
| [chemical structure] | 31 |
| [chemical structure] | 32 |
| [chemical structure] | 33 |
| [chemical structure] | 34 |
| [chemical structure] | 35 |
| [chemical structure] | 36 |
| [chemical structure] | 37 |
| [chemical structure] | 38 |
| [chemical structure] | 39 |
| [chemical structure] | 40 |
| [chemical structure] | 41 |
| [chemical structure] | 42 |
| [chemical structure] | 43 |
| [chemical structure] | 44 |
| [chemical structure] | 45 |
| [chemical structure] | 46 |
| [chemical structure] | 47 |
| [chemical structure] | 48 |
| [chemical structure] | 49 |
| [chemical structure] | 50 |
| [chemical structure] | 51 |
| [chemical structure] | 52 |
| [chemical structure] | 53 |
| [chemical structure] | 54 |
| [chemical structure] | 55 |
| [chemical structure] | 56 |
| [chemical structure] | 57 |
| [chemical structure] | 58 |
| [chemical structure] | 59 |
| [chemical structure] | 60 |
| [chemical structure] | 61 |
| [chemical structure] | 62 |
| [chemical structure] | 64 |
| [chemical structure] | 65 |
| [chemical structure] | 66 |
| [chemical structure] | 67 |
| [chemical structure] | 68 |
| [chemical structure] | 69 |
| [chemical structure] | 70 |
| [chemical structure] | 71 |
| [chemical structure] | 72 |
| [chemical structure] | 73 |
| [chemical structure] | 74 |
| [chemical structure] | 75 |
| [chemical structure] | 76 |
| [chemical structure] | 77 |
| [chemical structure] | 78 |
| [chemical structure] | 79 |
| [chemical structure] | 80 |
| [chemical structure] | 81 |
| [chemical structure] | 82 |
| [chemical structure] | 83 |
| [chemical structure] | 84 |
| [chemical structure] | 85 |
| [chemical structure] | 86 |
| [chemical structure] | 87 |
| [chemical structure] | 88 |
| [chemical structure] | 89 |

[1582] In some embodiments, an LNP of the present disclosure comprises an ionizable lipid disclosed in PCT Application PCT/US2022/076415.

### Formula (CY)

[1583] In some embodiments, an LNP disclosed herein comprises an ionizable lipid of Formula (CY)

[chemical structure]

[1584] or a pharmaceutically acceptable salt thereof,
[1585] wherein:
[1586] R¹ is selected from the group consisting of —OH, —OAc, R^{1a},

[chemical structure]

[1587] Z¹ is optionally substituted C₁-C₆ alkyl;
[1588] X¹ is optionally substituted C₂-C₆ alkylenyl;
[1589] X² is selected from the group consisting of a bond, —CH₂— and —CH₂CH₂—;
[1590] X^{2′} is selected from the group consisting of a bond, —CH₂— and —CH₂CH₂—;
[1591] X³ is selected from the group consisting of a bond, —CH₂— and —CH₂CH₂—;
[1592] X^{3′} is selected from the group consisting of a bond, —CH₂— and —CH₂CH₂—;
[1593] X⁴ and X⁵ are independently optionally substituted C₂-C₁₄ alkylenyl or optionally substituted C₂-C₁₄ alkenylenyl;
[1594] Y¹ and Y² are independently selected from the group consisting of

[chemical structure]

[1595] wherein the bond marked with an “*” is attached to X⁴ or X⁵;
[1596] each Z² is independently H or optionally substituted C₁-C₈ alkyl;
[1597] each Z³ is independently optionally substituted C₁-C₆ alkylenyl;
[1598] R² is selected from the group consisting of optionally substituted C₄-C₂₀ alkyl, optionally substituted C₂-C₁₄ alkenyl, and —(CH₂)ₚCH(OR⁶)(OR⁷);
[1599] R³ is selected from the group consisting of optionally substituted C₄-C₂₀ alkyl, optionally substituted C₂-C₁₄ alkenyl, or —(CH₂)_{q}CH(OR⁸)(OR⁹);
[1600] R^{1a} is:

[chemical structure]

[1601] R^{2a}, R^{2b}, and R^{2c} are independently hydrogen and C₁-C₆ alkyl;
[1602] R^{3a}, R^{3b}, and R^{3c} are independently hydrogen and C₁-C₆ alkyl;
[1603] R^{4a}, R^{4b}, and R^{4c} are independently hydrogen and C₁-C₆ alkyl;
[1604] R^{5a}, R^{5b}, and R^{5c} are independently hydrogen and C₁-C₆ alkyl;
[1605] R⁶, R⁷, R⁸, and R⁹ are independently optionally substituted C₁-C₁₄ alkyl, optionally substituted C₂-C₁₄ alkenyl, or —(CH₂)ₘ-A-(CH₂)ₙH;
[1606] each A is independently a C₃-C₈ cycloalkylenyl;
[1607] each m is independently 0, 1, 2, 3, 4, 5, 6, 7, 8, 9, 10, 11, or 12;
[1608] each n is independently 0, 1, 2, 3, 4, 5, 6, 7, 8, 9, 10, 11, or 12;
[1609] p is selected from the group consisting of 0, 1, 2, 3, 4, 5, 6, and 7; and
[1610] q is selected from the group consisting of 0, 1, 2, 3, 4, 5, 6, and 7.

### Formulas (CY-I), (CY-II), (CY-III), (CY-IV), and (CY-V)

[1611] In some embodiments, the present disclosure includes a compound of Formula (CY-I), (CY-II), (CY-III), (CY-IV), or (CY-V):

[chemical structure]

[1612] or a pharmaceutically acceptable salt thereof,
[1613] wherein X¹, X², X^{2′}, X³, X^{3′}, X⁴, X⁵, Y¹, Y², R¹, R², and R³ are defined herein.

### Formulas (CY-VI) and (CY-VII)

[1614] In some embodiments, the present disclosure includes a compound of Formula (CY-VI) or (CY-VII):

[chemical structure]

[1615] or a pharmaceutically acceptable salt thereof,
[1616] wherein X¹, X⁴, X⁵, R¹, R², and R³ are defined herein.

### Formulas (CY-VIII) and (CY-IX)

[1617] In some embodiments, the present disclosure includes a compound of Formula (CY-VIII) or (CY-IX):

[chemical structure]

[1618] or pharmaceutically acceptable salt thereof
[1619] wherein X¹, X⁴, X⁵, R¹, R², and R³ are defined herein.

### Formulas (CY-IV-a), (CY-IV-b), and (CY-IV-c)

[1620] In some embodiments, the present disclosure includes a compound of Formula (CY-IV-a), (CY-IV-b), or (CY-IV-c)

[chemical structure]

[1621] or pharmaceutically acceptable salt thereof
[1622] wherein X¹, X⁴, X⁵, R², and R³ are defined herein.

### Formulas (CY-IV-d), (CY-IV-e), and (CY-IV-f)

[1623] In some embodiments, the present disclosure includes a compound of Formula (CY-IV-d), (CY-IV-e), or (CY-IV-f)

[chemical structure]

[1624] or pharmaceutically acceptable salt thereof
[1625] wherein X¹, X⁴, X⁵, R², and R³ are defined herein.

[1626] R¹

[1627] In some embodiments, R¹ is selected from the group consisting of —OH, —OAc, R^{1a},

[chemical structure]

In some embodiments, R¹ is —OH or —OAc. In some embodiments, R¹ is OH. In some embodiments, R¹ is —OAc. In some embodiments, R¹ is R^{1a}. In some embodiments, R¹ is imidazolyl. In some embodiments, R¹ is

[chemical structure]

[1628] R²

[1629] In some embodiments, R² is selected from the group consisting of optionally substituted C₄-C₂₀ alkyl, optionally substituted C₂-C₁₄ alkenyl, and —(CH₂)ₚCH(OR⁶)(OR⁷).

[1630] In some embodiments, R² is optionally substituted C₄-C₂₀ alkyl. In some embodiments, R² is optionally substituted C₈-C₁₇ alkyl. In some embodiments, R² is optionally substituted C₉-C₁₆ alkyl. In some embodiments, R² is optionally substituted C₈-C₁₀ alkyl. In some embodiments, R² is optionally substituted C₁₁-C₁₃ alkyl. In some embodiments, R² is optionally substituted C₁₄-C₁₆ alkyl. In some embodiments, R² is optionally substituted C₉ alkyl. In some embodiments, R² is optionally substituted C₁₀ alkyl. In some embodiments, R² is optionally substituted C₁₁ alkyl. In some embodiments, R² is optionally substituted C₁₂ alkyl. In some embodiments, R² is optionally substituted C₁₃ alkyl. In some embodiments, R² is optionally substituted C₁₄ alkyl. In some embodiments, R² is optionally substituted C₁₅ alkyl. In some embodiments, R² is optionally substituted C₁₆ alkyl.

[1631] In some embodiments, R² is optionally substituted C₂-C₁₄ alkenyl. In some embodiments, R² is optionally substituted C₅-C₁₄ alkenyl. In some embodiments, R² is optionally substituted C₇-C₁₄ alkenyl. In some embodiments, R² is optionally substituted C₉-C₁₄ alkenyl. In some embodiments, R² is optionally substituted C₁₀-C₁₄ alkenyl. In some embodiments, R² is optionally substituted C₁₂-C₁₄ alkenyl.

[1632] In some embodiments, R² is —(CH₂)ₚCH(OR⁶)(OR⁷). In some embodiments, R² is —CH(OR⁶)(OR⁷). In some embodiments, R² is —CH₂CH(OR⁶)(OR⁷). In some embodiments, R² is —(CH₂)₂CH(OR⁶)(OR⁷). In some embodiments, R² is —(CH₂)₃CH(OR⁶)(OR⁷). In some embodiments, R² is —(CH₂)₄CH(OR⁶)(OR⁷).

[1633] In some embodiments, R² is selected from the group consisting of

[chemical structure]

[1634] R³

[1635] In some embodiments, R³ is selected from the group consisting of optionally substituted C₄-C₂₀ alkyl, optionally substituted C₂-C₁₄ alkenyl, and —(CH₂)_{q}CH(OR⁶)(OR⁷).

[1636] In some embodiments, R³ is optionally substituted C₄-C₂₀ alkyl. In some embodiments, R³ is optionally substituted C₈-C₁₇ alkyl. In some embodiments, R³ is optionally substituted C₉-C₁₆ alkyl. In some embodiments, R³ is optionally substituted C₈-C₁₀ alkyl. In some embodiments, R³ is optionally substituted C₁₁-C₁₃ alkyl. In some embodiments, R³ is optionally substituted C₁₄-C₁₆ alkyl. In some embodiments, R³ is optionally substituted C₉ alkyl. In some embodiments, R³ is optionally substituted C₁₀ alkyl. In some embodiments, R³ is optionally substituted C₁₁ alkyl. In some embodiments, R³ is optionally substituted C₁₂ alkyl. In some embodiments, R³ is optionally substituted C₁₃ alkyl. In some embodiments, R³ is optionally substituted C₁₄ alkyl. In some embodiments, R³ is optionally substituted C₁₅ alkyl. In some embodiments, R³ is optionally substituted C₁₆ alkyl.

[1637] In some embodiments, R³ is optionally substituted C₂-C₁₄ alkenyl. In some embodiments, R³ is optionally substituted C₅-C₁₄ alkenyl. In some embodiments, R³ is optionally substituted C₇-C₁₄ alkenyl. In some embodiments, R³ is optionally substituted C₉-C₁₄ alkenyl. In some embodiments, R³ is optionally substituted C₁₀-C₁₄ alkenyl. In some embodiments, R³ is optionally substituted C₁₂-C₁₄ alkenyl.

[1638] In some embodiments, R³ is —(CH₂)_{q}CH(OR⁸)(OR⁹). In some embodiments, R³ is —CH(OR⁸)(OR⁹). In some embodiments, R³ is —CH₂CH(OR⁸)(OR⁹). In some embodiments, R³ is —(CH₂)₂CH(OR⁸)(OR⁹). In some embodiments, R³ is —(CH₂)₃CH(OR⁸)(OR⁹). In some embodiments, R³ is —(CH₂)₄CH(OR⁸)(OR⁹).

[1639] In some embodiments, R³ is selected from the group consisting of

[chemical structure]

[1640] R⁶, R⁷, R⁸, R⁹

[1641] In some embodiments, R⁶, R⁷, R⁸, and R⁹ are independently optionally substituted C₁-C₁₄ alkyl, optionally substituted C₂-C₁₄ alkenyl, or —(CH₂)ₘ-A-(CH₂)ₙH. In some embodiments, R⁶, R⁷, R⁸, and R⁹ are independently optionally substituted C₁-C₁₄ alkyl. In some embodiments, R⁶, R⁷, R⁸, and R⁹ are independently optionally substituted C₂-C₁₄ alkenyl. In some embodiments, R⁶, R⁷, R⁸, and R⁹ are independently —(CH₂)ₘ-A-(CH₂)ₙH.

[1642] In some embodiments, R⁶ is optionally substituted C₁-C₁₄ alkyl, optionally substituted C₂-C₁₄ alkenyl, or —(CH₂)ₘ-A-(CH₂)ₙH. In some embodiments, R⁶ is optionally substituted C₃-C₁₀ alkyl. In some embodiments, R⁶ is optionally substituted C₄-C₁₀ alkyl. In some embodiments, R⁶ is independently optionally substituted C₉-C₁₀ alkyl. In some embodiments, R⁶ is optionally substituted C₉-C₁₀ alkyl. In some embodiments, R⁶ is optionally substituted C₁-C₁₄ alkyl. In some embodiments, R⁶ is optionally substituted C₂-C₁₄ alkenyl. In some embodiments, R⁶ is —(CH₂)ₘ-A-(CH₂)ₙH.

[1643] In some embodiments, R⁷ is optionally substituted C₁-C₁₄ alkyl, optionally substituted C₂-C₁₄ alkenyl, or —(CH₂)ₘ-A-(CH₂)ₙH. In some embodiments, R⁷ is optionally substituted C₃-C₁₀ alkyl. In some embodiments, R⁷ is optionally substituted C₄-C₁₀ alkyl. In some embodiments, R⁷ is optionally substituted C₉-C₁₀ alkyl. In some embodiments, R⁷ is optionally substituted C₉-C₁₀ alkyl. In some embodiments, R⁷ is optionally substituted C₁-C₁₄ alkyl. In some embodiments, R⁷ is optionally substituted optionally substituted C₂-C₁₄ alkenyl. In some embodiments, R⁷ is —(CH₂)ₘ-A-(CH₂)ₙH.

[1644] In some embodiments, R⁸ is optionally substituted C₁-C₁₄ alkyl, optionally substituted C₂-C₁₄ alkenyl, or —(CH₂)ₘ-A-(CH₂)ₙH. In some embodiments, R⁸ is optionally substituted C₃-C₁₀ alkyl. In some embodiments, R⁸ is optionally substituted C₄-C₁₀ alkyl. In some embodiments, R⁸ is optionally substituted C₉-C₁₀ alkyl. In some embodiments, R⁸ is optionally substituted C₉-C₁₀ alkyl. In some embodiments, R⁸ is optionally substituted C₁-C₁₄ alkyl. In some embodiments, R⁸ is optionally substituted C₂-C₁₄ alkenyl. In some embodiments, R⁸ is —(CH₂)ₘ-A-(CH₂)ₙH.

[1645] In some embodiments, R⁹ is optionally substituted C₁-C₁₄ alkyl, optionally substituted C₂-C₁₄ alkenyl, or —(CH₂)ₘ-A-(CH₂)ₙH. In some embodiments, R⁹ is optionally substituted C₃-C₁₀ alkyl. In some embodiments, R⁹ is optionally substituted C₄-C₁₀ alkyl. In some embodiments, R⁹ is optionally substituted C₅-C₁₀ alkyl. In some embodiments, R⁹ is optionally substituted C₉-C₁₀ alkyl. In some embodiments, R⁹ is optionally substituted C₁-C₁₄ alkyl. In some embodiments, R⁹ is optionally substituted C₂-C₁₄ alkenyl. In some embodiments, R⁹ is —(CH₂)ₘ-A-(CH₂)ₙH.

[1646] In some embodiments, each m is independently 0, 1, 2, 3, 4, 5, 6, 7, 8, 9, 10, 11, or 12. In some embodiments, each m is 0. In some embodiments, each m is 1. In some embodiments, each m is 2. In some embodiments, each m is 3. In some embodiments, each m is 4. In some embodiments, each m is 5. In some embodiments, each m is 6. In some embodiments, each m is 7. In some embodiments, each m is 8. In some embodiments, each m is 9. In some embodiments, each m is 10. In some embodiments, each m is 11. In some embodiments, each m is 12.

[1647] In some embodiments, each n is independently 0, 1, 2, 3, 4, 5, 6, 7, 8, 9, 10, 11, or 12. In some embodiments, each n is 0. In some embodiments, each n is 1. In some embodiments, each n is 2. In some embodiments, each n is 3. In some embodiments, each n is 4. In some embodiments, each n is 5. In some embodiments, each n is 6. In some embodiments, each n is 7. In some embodiments, each n is 8. In some embodiments, each n is 9. In some embodiments, each n is 10. In some embodiments, each n is 11. In some embodiments, each n is 12.

[1648] In some embodiments, each A is independently a C₃-C₈ cycloalkylenyl. In some embodiments, each A is cyclopropylenyl.

[1649] X¹

[1650] In some embodiments, X¹ is optionally substituted C₂-C₆ alkylenyl. In some embodiments, X¹ is optionally substituted C₂-C₅ alkylenyl. In some embodiments, X¹ is optionally substituted C₂-C₄ alkylenyl. In some embodiments, X¹ is optionally substituted C₂-C₃ alkylenyl. In some embodiments, X¹ is optionally substituted C₂ alkylenyl. In some embodiments, X¹ is optionally substituted C₃ alkylenyl. In some embodiments, X¹ is optionally substituted C₄ alkylenyl. In some embodiments, X¹ is optionally substituted C₅ alkylenyl. In some embodiments, X¹ is optionally substituted C₆ alkylenyl. In some embodiments, X¹ is optionally substituted —(CH₂)₂—. In some embodiments, X¹ is optionally substituted —(CH₂)₃—. In some embodiments, X¹ is optionally substituted —(CH₂)₄—. In some embodiments, X¹ is optionally substituted —(CH₂)₅—. In some embodiments, X¹ is optionally substituted —(CH₂)₆—.

[1651] X²

[1652] In some embodiments, X² is selected from the group consisting of a bond, —CH₂— and —CH₂CH₂—. In some embodiments, X² is a bond. In some embodiments, X² is —CH₂—. In some embodiments, X² is —CH₂CH₂—. X^{2′}

[1653] In some embodiments, X^{2′} is selected from the group consisting of a bond, —CH₂— and —CH₂CH₂—.

[1654] In some embodiments, X^{2′} is a bond. In some embodiments, X^{2′} is —CH₂—. In some embodiments, X^{2′} is —CH₂CH₂—.

[1655] X³

[1656] In some embodiments, X³ is selected from the group consisting of a bond, —CH₂— and —CH₂CH₂—.

[1657] In some embodiments, X³ is a bond. In some embodiments, X³ is —CH₂—. In some embodiments, X³ is —CH₂CH₂—.

[1658] X³,

[1659] In some embodiments, X^{3′} is selected from the group consisting of a bond, —CH₂— and —CH₂CH₂—.

[1660] In some embodiments, X^{3′} is a bond. In some embodiments, X^{3′} is —CH₂—. In some embodiments, X^{3′} is —CH₂CH₂—.

[1661] X⁴

[1662] In some embodiments, X⁴ is selected from the group consisting of optionally substituted C₂-C₁₄ alkylenyl and optionally substituted C₂-C₁₄ alkenylenyl. In some embodiments, X⁴ is optionally substituted C₂-C₁₄ alkylenyl. In some embodiments, X⁴ is optionally substituted C₂-C₁₀ alkylenyl. In some embodiments, X⁴ is optionally substituted C₂-C₈ alkylenyl. In some embodiments, X⁴ is optionally substituted C₂-C₆ alkylenyl. In some embodiments, X⁴ is optionally substituted C₃-C₆ alkylenyl. In some embodiments, X⁴ is optionally substituted C₃ alkylenyl. In some embodiments, X⁴ is optionally substituted C₄ alkylenyl. In some embodiments, X⁴ is optionally substituted C₅ alkylenyl. In some embodiments, X⁴ is optionally substituted C₆ alkylenyl. In some embodiments, X⁴ is optionally substituted —(CH₂)₂—. In some embodiments, X⁴ is optionally substituted —(CH₂)₃—. In some embodiments, X⁴ is optionally substituted —(CH₂)₄—. In some embodiments, X⁴ is optionally substituted —(CH₂)₅—. In some embodiments, X⁴ is optionally substituted —(CH₂)₆—.

[1663] X⁵

[1664] In some embodiments, X⁵ is selected from the group consisting of optionally substituted C₂-C₁₄ alkylenyl and optionally substituted C₂-C₁₄ alkenylenyl. In some embodiments, X⁵ is optionally substituted C₂-C₁₄ alkylenyl. In some embodiments, X⁵ is optionally substituted C₂-C₁₀ alkylenyl. In some embodiments, X⁵ is optionally substituted C₂-C₈ alkylenyl. In some embodiments, X⁵ is optionally substituted C₂-C₆ alkylenyl. In some embodiments, X⁵ is optionally substituted C₃-C₆ alkylenyl. In some embodiments, X⁵ is optionally substituted C₃ alkylenyl. In some embodiments, X⁵ is optionally substituted C₄ alkylenyl. In some embodiments, X⁵ is optionally substituted C₅ alkylenyl. In some embodiments, X⁵ is optionally substituted C₆ alkylenyl. In some embodiments, X⁵ is optionally substituted —(CH₂)₂—. In some embodiments, X⁵ is optionally substituted —(CH₂)₃—. In some embodiments, X⁵ is optionally substituted —(CH₂)₄—. In some embodiments, X⁵ is optionally substituted —(CH₂)₅—. In some embodiments, X⁵ is optionally substituted —(CH₂)₆—.

[1665] Y¹

[1666] In some embodiments, Y¹ is selected from the group consisting of

[chemical structure]

[1667] In some embodiments, Y¹ is selected from the group consisting of

[chemical structure]

[1668] In some embodiments, Y¹ is

[chemical structure]

[1669] In some embodiments, Y¹ is

[chemical structure]

[1670] In some embodiments, Y¹ is

[chemical structure]

[1671] Y²

[1672] In some embodiments, Y² is selected from the group consisting of

[chemical structure]

[1673] In some embodiments, Y² is selected from the group consisting of

[chemical structure]

[1674] In some embodiments, Y² is

[chemical structure]

[1675] In some embodiments, Y² is

[chemical structure]

[1676] In some embodiments, Y² is

[chemical structure]

[1677] In some embodiments, Y² is

[chemical structure]

### Formula (CY-I′)

[1678] In some embodiments, Lipids of the Disclosure have a structure of Formula (CY-I′):

[chemical structure]

[1679] or a pharmaceutically acceptable salt thereof, wherein:
[1680] R¹ is —OH, R^{1a},

[chemical structure]

[1681] Z¹ is optionally substituted C₁-C₆ alkyl;
[1682] X¹ is optionally substituted C₂-C₆ alkylenyl;
[1683] X² and X³ are independently a bond, —CH₂—, or —CH₂CH₂—;
[1684] X⁴ and X⁵ are independently optionally substituted C₂-C₁₄ alkylenyl or optionally substituted C₂-C₁₄ alkenylenyl;
[1685] Y¹ and Y² are independently

[chemical structure]

[1686] wherein the bond marked with an “*” is attached to X⁴ or X⁵;
[1687] each Z² is independently H or optionally substituted C₁-C₈ alkyl;
[1688] each Z³ is independently optionally substituted C₁-C₆ alkylenyl;
[1689] R² is optionally substituted C₄-C₂₀ alkyl, optionally substituted C₂-C₁₄ alkenyl, or —CH(OR⁶)(OR⁷);
[1690] R³ is optionally substituted C₄-C₂₀ alkyl, optionally substituted C₂-C₁₄ alkenyl, or —CH(OR⁸)(OR⁹);
[1691] R^{1a} is:

[chemical structure]

[1692] R^{2a}, R^{2b}, and R^{2c} are independently hydrogen and C₁-C₆ alkyl;
[1693] R^{3a}, R^{3b}, and R^{3c} are independently hydrogen and C₁-C₆ alkyl;
[1694] R^{4a}, R^{4b}, and R^{4c} are independently hydrogen and C₁-C₆ alkyl;
[1695] R^{5a}, R^{5b}, and R^{5c} are independently hydrogen and C₁-C₆ alkyl;
[1696] R⁶, R⁷, R⁸, and R⁹ are independently optionally substituted C₁-C₁₄ alkyl, optionally substituted C₂-C₁₄ alkenyl, or —(CH₂)ₘ-A-(CH₂)ₙH;
[1697] A is a C₃-C₈ cycloalkylenyl;
[1698] each m is independently 0, 1, 2, 3, 4, 5, 6, 7, 8, 9, 10, 11, or 12; and
[1699] each n is independently 0, 1, 2, 3, 4, 5, 6, 7, 8, 9, 10, 11, or 12.

[1700] In some embodiments, Lipids of the Disclosure have a structure of Formula (CY-I′), wherein:
[1701] R¹ is —OH, R^{1a},

[chemical structure]

[1702] wherein Z¹ is optionally substituted C₁-C₆ alkyl;
[1703] X¹ is optionally substituted C₂-C₆ alkylenyl;
[1704] X² and X³ are independently a bond, —CH₂—, or —CH₂CH₂—;
[1705] X⁴ and X⁵ are independently optionally substituted C₂-C₁₄ alkylenyl;
[1706] Y¹ and Y² are independently

[chemical structure]

[1707] R² and R³ are independently optionally substituted C₄-C₂₀ alkyl;
[1708] R^{1a} is:

[chemical structure]

[1709] R^{2a}, R^{2b}, and R^{2c} are independently hydrogen and C₁-C₆ alkyl;
[1710] R^{3a}, R^{3b}, and R^{3c} are independently hydrogen and C₁-C₆ alkyl;
[1711] R^{4a}, R^{4b}, and R^{4c} are independently hydrogen and C₁-C₆ alkyl; and
[1712] R^{5a}, R^{5b}, and R^{5c} are independently hydrogen and C₁-C₆ alkyl.

[1713] In some embodiments, Lipids of the Disclosure have a structure of Formula (CY-II′), wherein:
[1714] R¹ is —OH, R^{1a},

[chemical structure]

[1715] wherein Z¹ is optionally substituted C₁-C₆ alkyl;
[1716] X¹ is optionally substituted C₂-C₆ alkylenyl;
[1717] X² and X³ are independently a bond, —CH₂—, or —CH₂CH₂—;
[1718] X⁴ and X⁵ are independently optionally substituted C₂-C₁₄ alkylenyl;
[1719] Y¹ and Y² are independently

[chemical structure]

[1720] R² and R³ are independently optionally substituted C₄-C₂₀ alkyl;
[1721] R^{1a} is:

[chemical structure]

[1722] R^{2a}, R^{2b}, and R^{2c} are independently hydrogen and C₁-C₆ alkyl;
[1723] R^{3a}, R^{3b}, and R^{3c} are independently hydrogen and C₁-C₆ alkyl;
[1724] R^{4a}, R^{4b}, and R^{4c} are independently hydrogen and C₁-C₆ alkyl; and
[1725] R^{5a}, R^{5b}, and R^{5c} are independently hydrogen and C₁-C₆ alkyl.

[1726] In some embodiments, Lipids of the Disclosure have a structure of Formula (CY-I′), wherein R¹ is —OH,

[chemical structure]

[1727] In some embodiments, Lipids of the Disclosure have a structure of Formula (CY-I′), wherein Y¹ and Y² are independently:

[chemical structure]

[1728] In some embodiments, Lipids of the Disclosure have a structure of Formula (CY-I′), wherein R² is —CH(OR⁶)(OR⁷).

[1729] In some embodiments, Lipids of the Disclosure have a structure of Formula (CY-I′), wherein R³ is —CH(OR⁸)(OR⁹).

[1730] Non-limiting examples of lipids having a structure of Formula (CY-I′) include compounds CY1, CY2, CY3, CY9, CY10, CY11, CY12, CY22, CY23, CY24, CY30, CY31, CY32, CY33, CY43, CY44, CY45, CY50, CY51, CY52, and CY53.

### Formula (CY-II′)

[1731] In some embodiments, Lipids of the Disclosure have a structure of Formula (CY-II′):

[chemical structure]

or a pharmaceutically acceptable salt thereof, wherein R¹, R², R³, X¹, X², X³, X⁴, X⁵, Y¹, and Y² are as defined in connection with Formula (CY-I′).

[1732] In some embodiments, Lipids of the Disclosure have a structure of Formula (CY-II′), wherein:
[1733] R¹ is —OH, R^{1a},

[chemical structure]

[1734] wherein Z¹ is optionally substituted C₁-C₆ alkyl;
[1735] X¹ is optionally substituted C₂-C₆ alkylenyl;
[1736] X² and X³ are independently a bond, —CH₂—, or —CH₂CH₂—;
[1737] X⁴ and X⁵ are independently optionally substituted C₂-C₁₄ alkylenyl;
[1738] Y¹ and Y² are independently

[chemical structure]

[1739] R² and R³ are independently optionally substituted C₄-C₂₀ alkyl;
[1740] R^{1a} is:

[chemical structure]

[1741] R^{2a}, R^{2b}, and R^{2c} are independently hydrogen and C₁-C₆ alkyl;
[1742] R^{3a}, R^{3b}, and R^{3c} are independently hydrogen and C₁-C₆ alkyl;
[1743] R^{4a}, R^{4b}, and R^{4c} are independently hydrogen and C₁-C₆ alkyl; and
[1744] R^{5a}, R^{5b}, and R^{5c} are independently hydrogen and C₁-C₆ alkyl.

[1745] In some embodiments, Lipids of the Disclosure have a structure of Formula (CY-II′), wherein R¹ is —OH,

[chemical structure]

[1746] In some embodiments, Lipids of the Disclosure have a structure of Formula (CY-II′), wherein Y¹ and Y² are independently:

[chemical structure]

[1747] In some embodiments, Lipids of the Disclosure have a structure of Formula (CY-II′), wherein R² is —CH(OR⁶)(OR⁷).

[1748] In some embodiments, Lipids of the Disclosure have a structure of Formula (CY-II′), wherein R³ is —CH(OR⁸)(OR⁹).

[1749] Non-limiting examples of lipids having a structure of Formula (CY-II′) include compounds CY4, CY5, CY16, CY17, CY18, CY25, CY26, CY37, CY38, CY39, CY46, CY56, and CY57.

### Formula (CY-III′)

[1750] In some embodiments, Lipids of the Disclosure have a structure of Formula (CY-III′):

[chemical structure]

[1751] or a pharmaceutically acceptable salt thereof, wherein R¹, R², R³, X¹, X², X³, X⁴, X⁵, Y¹, and Y² are as defined in connection with Formula (CY-I′).

[1752] In some embodiments, Lipids of the Disclosure have a structure of Formula (CY-III′), wherein
[1753] R¹ is —OH, R^{1a},

[chemical structure]

[1754] wherein Z¹ is optionally substituted C₁-C₆ alkyl;
[1755] X¹ is optionally substituted C₂-C₆ alkylenyl;
[1756] X² and X³ are independently a bond, —CH₂—, or —CH₂CH₂—;
[1757] X⁴ and X⁵ are independently optionally substituted C₂-C₁₄ alkylenyl;
[1758] Y¹ and Y² are independently

[chemical structure]

[1759] R² and R³ are independently optionally substituted C₄-C₂₀ alkyl;
[1760] R^{1a} is:

[chemical structure]

[1761] R^{2a}, R^{2b}, and R^{2c} are independently hydrogen and C₁-C₆ alkyl;
[1762] R^{3a}, R^{3b}, and R^{3c} are independently hydrogen and C₁-C₆ alkyl;
[1763] R^{4a}, R^{4b}, and R^{4c} are independently hydrogen and C₁-C₆ alkyl; and
[1764] R^{5a}, R^{5b}, and R^{5c} are independently hydrogen and C₁-C₆ alkyl.

[1765] In some embodiments, Lipids of the Disclosure have a structure of Formula (CY-III′), wherein R¹ is —OH,

[chemical structure]

[1766] In some embodiments, Lipids of the Disclosure have a structure of Formula (CY-III′), wherein Y¹ and Y² are independently:

[chemical structure]

[1767] In some embodiments, Lipids of the Disclosure have a structure of Formula (CY-III′), wherein R² is —CH(OR⁶)(OR⁷).

[1768] In some embodiments, Lipids of the Disclosure have a structure of Formula (CY-III′), wherein R³ is —CH(OR⁸)(OR⁹).

[1769] Non-limiting examples of lipids having a structure of Formula (CY-III′) include CY6, CY14, CY27, CY35, CY47, and CY55.

### Formula (CY-IV′)

[1770] In some embodiments, Lipids of the Disclosure have a structure of Formula (CY-IV′):

[chemical structure]

[1771] or a pharmaceutically acceptable salt thereof, wherein R¹, R², R¹, X¹, X², X³, X⁴, X⁵, Y¹, and Y² are as defined in connection with Formula (CY-I′).

[1772] In some embodiments, Lipids of the Disclosure have a structure of Formula (CY-IV′), wherein:
[1773] R¹ is —OH, R^{1a},

[chemical structure]

[1774] wherein Z¹ is optionally substituted C₁-C₆ alkyl;
[1775] X¹ is optionally substituted C₂-C₆ alkylenyl;
[1776] X² and X³ are independently a bond, —CH₂—, or —CH₂CH₂—;
[1777] X⁴ and X⁵ are independently optionally substituted C₂-C₁₄ alkylenyl;
[1778] Y¹ and Y² are independently

[chemical structure]

[1779] R² and R³ are independently optionally substituted C₄-C₂₀ alkyl;
[1780] R^{1a} is:

[chemical structure]

[1781] R^{2a}, R^{2b}, and R^{2c} are independently hydrogen and C₁-C₆ alkyl;
[1782] R^{3a}, R^{3b}, and R^{3c} are independently hydrogen and C₁-C₆ alkyl;
[1783] R^{4a}, R^{4b}, and R^{4c} are independently hydrogen and C₁-C₆ alkyl; and
[1784] R^{5a}, R^{5b}, and R^{5c} are independently hydrogen and C₁-C₆ alkyl

[1785] In some embodiments, Lipids of the Disclosure have a structure of Formula (CY-IV′), wherein R¹ is —OH,

[chemical structure]

[1786] In some embodiments, Lipids of the Disclosure have a structure of Formula (CY-IV′), wherein Y¹ and Y² are independently:

[chemical structure]

[1787] In some embodiments, Lipids of the Disclosure have a structure of Formula (CY-IV′), wherein R² is —CH(OR⁶)(OR⁷).

[1788] In some embodiments, Lipids of the Disclosure have a structure of Formula (CY-IV′), wherein R is —CH(OR⁸)(OR⁹).

[1789] Non-limiting examples of lipids having a structure of Formula (CY-IV′) include compounds CY7, CY8, CY19, CY20, CY21, CY28, CY29, CY40, CY41, CY42, CY48, CY49, CY58, CY59, and CY60.

### Formula (CY-V′)

[1790] In some embodiments, Lipids of the Disclosure have a structure of Formula (CY-V′):

[chemical structure]

[1791] or a pharmaceutically acceptable salt thereof, wherein:
[1792] X⁶ and X⁷ are independently —CH₂— or —CH₂CH₂—; and
[1793] R¹, R², R³, X¹, X⁴, X⁵, Y¹, and Y² are as defined in connection with Formula (CY-I′).

[1794] In some embodiments, Lipids of the Disclosure have a structure of Formula (CY-V′), wherein:
[1795] R¹ is —OH, R^{1a},

[chemical structure]

[1796] wherein Z¹ is optionally substituted C₁-C₆ alkyl;
[1797] X¹ is optionally substituted C₂-C₆ alkylenyl;
[1798] X² and X³ are independently a bond, —CH₂—, or —CH₂CH₂—;
[1799] X⁴ and X⁵ are independently optionally substituted C₂-C₁₄ alkylenyl;
[1800] Y¹ and Y² are independently

[chemical structure]

[1801] R² and R³ are independently optionally substituted C₄-C₂₀ alkyl;
[1802] R^{1a} is:

[chemical structure]

[1803] R^{2a}, R^{2b}, and R^{2c} are independently hydrogen and C₁-C₆ alkyl;
[1804] R^{3a}, R^{3b}, and R^{3c} are independently hydrogen and C₁-C₆ alkyl;
[1805] R^{4a}, R^{4b}, and R^{4c} are independently hydrogen and C₁-C₆ alkyl; and
[1806] R^{5a}, R^{5b}, and R^{5c} are independently hydrogen and C₁-C₆ alkyl

[1807] In some embodiments, Lipids of the Disclosure have a structure of Formula (CY-V′), wherein Y¹ and Y² are independently:

[chemical structure]

[1808] In some embodiments, Lipids of the Disclosure have a structure of Formula (CY-V′), wherein R² is —CH(OR⁶)(OR⁷).

[1809] In some embodiments, Lipids of the Disclosure have a structure of Formula (CY-V′), wherein R³ is —CH(OR⁸)(OR⁹).

[1810] Non-limiting examples of lipids having a structure of Formula (CY-V′) include compounds CY13, CY15, CY34, CY36, and CY54.

### Formula (CY-VI′)

[1811] In some embodiments, Lipids of the Disclosure have a structure of Formula (CY-VI′):

[chemical structure]

or a pharmaceutically acceptable salt thereof, wherein R¹, R⁶, R⁷, R⁸, R⁹, X¹, X², X³, X⁴, X⁵, Y¹, and Y² are as defined in connection with Formula (CY-I′).

[1812] In some embodiments, Lipids of the Disclosure have a structure of Formula (CY-VI′), or a pharmaceutically acceptable salt thereof, wherein R¹ is —OH.

[1813] In some embodiments, Lipids of the Disclosure have a structure of Formula (CY-VI′), or a pharmaceutically acceptable salt thereof, wherein X¹ is C₂-C₆ alkylenyl.

[1814] In some embodiments, Lipids of the Disclosure have a structure of Formula (CY-VI′), or a pharmaceutically acceptable salt thereof, wherein X² is —CH₂CH₂—.

[1815] In some embodiments, Lipids of the Disclosure have a structure of Formula (CY-VI′), or a pharmaceutically acceptable salt thereof, wherein X⁴ is C₂-C₆ alkylenyl.

[1816] In some embodiments, Lipids of the Disclosure have a structure of Formula (CY-VI′), or a pharmaceutically acceptable salt thereof, wherein X⁵ is C₂-C₆ alkylenyl.

[1817] In some embodiments, Lipids of the Disclosure have a structure of Formula (CY-VI′), or a pharmaceutically acceptable salt thereof, wherein Y¹ is:

[chemical structure]

[1818] In some embodiments, Lipids of the Disclosure have a structure of Formula (CY-VI′), or a pharmaceutically acceptable salt thereof, wherein Y² is:

[chemical structure]

[1819] In some embodiments, Lipids of the Disclosure have a structure of Formula (CY-VI′), or a pharmaceutically acceptable salt thereof, wherein each Z³ is independently optionally substituted C₁-C₆ alkylenyl.

[1820] In some embodiments, Lipids of the Disclosure have a structure of Formula (CY-VI′), or a pharmaceutically acceptable salt thereof, wherein each Z³ is —CH₂CH₂—.

[1821] In some embodiments, Lipids of the Disclosure have a structure of Formula (CY-VI′), or a pharmaceutically acceptable salt thereof, wherein R⁶ is C₅-C₁₄ alkyl.

[1822] In some embodiments, Lipids of the Disclosure have a structure of Formula (CY-VI′), or a pharmaceutically acceptable salt thereof, wherein R⁷ is C₅-C₁₄ alkyl.

[1823] In some embodiments, Lipids of the Disclosure have a structure of Formula (CY-VI′), or a pharmaceutically acceptable salt thereof, wherein R⁶ is C₆-C₁₄ alkenyl.

[1824] In some embodiments, Lipids of the Disclosure have a structure of Formula (CY-VI′), or a pharmaceutically acceptable salt thereof, wherein R⁷ is C₆-C₁₄ alkenyl.

[1825] In some embodiments, Lipids of the Disclosure have a structure of Formula (CY-VI′), or a pharmaceutically acceptable salt thereof, wherein R⁸ is C₅-C₁₆ alkyl.

[1826] In some embodiments, Lipids of the Disclosure have a structure of Formula (CY-VI′), or a pharmaceutically acceptable salt thereof, wherein R⁹ is C₅-C₁₄ alkyl.

[1827] In some embodiments, Lipids of the Disclosure have a structure of Formula (CY-VI′), or a pharmaceutically acceptable salt thereof, wherein R⁹ is C₆-C₁₄ alkenyl.

[1828] In some embodiments, Lipids of the Disclosure have a structure of Formula (CY-VI′), or a pharmaceutically acceptable salt thereof, wherein R⁹ is C₆-C₁₄ alkenyl.

[1829] In some embodiments, Lipids of the Disclosure comprise a heterocyclic core, wherein the heteroatom is nitrogen. In some embodiments, the heterocyclic core comprises pyrrolidine or a derivative thereof. In some embodiments, the heterocyclic core comprises piperidine or a derivative thereof. In some embodiments, Lipids of the Disclosure are selected from any lipid in Table (II) below or a pharmaceutically acceptable salt thereof:

TABLE (II)
Non-Limiting Examples of Ionizable Lipids with a Cyclic Core

| Structure | Compound No. |
|---|---|
| [chemical structure] | CY1 |
| [chemical structure] | CY2 |
| [chemical structure] | CY3 |
| [chemical structure] | CY4 |
| [chemical structure] | CY5 |
| [chemical structure] | CY6 |
| [chemical structure] | CY7 |
| [chemical structure] | CY8 |
| [chemical structure] | CY9 |
| [chemical structure] | CY10 |
| [chemical structure] | CY11 |
| [chemical structure] | CY12 |
| [chemical structure] | CY13 |
| [chemical structure] | CY14 |
| [chemical structure] | CY15 |
| [chemical structure] | CY16 |
| [chemical structure] | CY17 |
| [chemical structure] | CY18 |
| [chemical structure] | CY19 |
| [chemical structure] | CY20 |
| [chemical structure] | CY21 |
| [chemical structure] | CY22 |
| [chemical structure] | CY23 |
| [chemical structure] | CY24 |
| [chemical structure] | CY25 |
| [chemical structure] | CY26 |
| [chemical structure] | CY27 |
| [chemical structure] | CY28 |
| [chemical structure] | CY29 |
| [chemical structure] | CY30 |
| [chemical structure] | CY31 |
| [chemical structure] | CY32 |
| [chemical structure] | CY33 |
| [chemical structure] | CY34 |
| [chemical structure] | CY35 |
| [chemical structure] | CY36 |
| [chemical structure] | CY37 |
| [chemical structure] | CY38 |
| [chemical structure] | CY39 |
| [chemical structure] | CY40 |
| [chemical structure] | CY41 |
| [chemical structure] | CY42 |
| [chemical structure] | CY43 |
| [chemical structure] | CY44 |
| [chemical structure] | CY45 |
| [chemical structure] | CY46 |
| [chemical structure] | CY47 |
| [chemical structure] | CY48 |
| [chemical structure] | CY49 |
| [chemical structure] | CY50 |
| [chemical structure] | CY51 |
| [chemical structure] | CY52 |
| [chemical structure] | CY53 |
| [chemical structure] | CY54 |
| [chemical structure] | CY55 |
| [chemical structure] | CY56 |
| [chemical structure] | CY57 |
| [chemical structure] | CY58 |
| [chemical structure] | CY59 |
| [chemical structure] | CY60 |
| [chemical structure] | CY61 |
| [chemical structure] | CY62 |
| [chemical structure] | CY63 |
| [chemical structure] | CY64 |
| [chemical structure] | CY65 |
| [chemical structure] | CY66 |
| [chemical structure] | CY67 |
| [chemical structure] | CY68 |
| [chemical structure] | CY69 |
| [chemical structure] | CY70 |
| [chemical structure] | CY71 |

[1830] In some embodiments, an LNP of the present disclosure comprises an ionizable lipid disclosed in PCT Application PCT/US2022/082276.

[1831] In one embodiment, the disclosure provides a compound of Formula IA:

[chemical structure]

[1832] or a pharmaceutically acceptable salt or solvate thereof, wherein:
[1833] A is selected from the group consisting of —N(R^{1a})— and —C(R′)—OC(═O)(R^{8a})—;
[1834] R^{1a} is -L¹-R¹;
[1835] L¹ is C₂-C₆ alkylenyl or —(CH₂)₂₋₆—OC(═O)—;
[1836] R¹ is selected from the group consisting of —OH,

[chemical structure]

[1837] R^{2a}, R^{2b}, and R^{2c} are independently selected from the group consisting of hydrogen and C₁-C₆ alkyl;
[1838] R^{3a}, R^{3b}, and R^{3c} are independently selected from the group consisting of hydrogen and C₁-C₆ alkyl;
[1839] R^{4a}, R^{4b}, and R^{4c} are independently selected from the group consisting of hydrogen and C₁-C₆ alkyl;
[1840] R^{5a}, R^{5b}, and R^{5c} are independently selected from the group consisting of hydrogen and C₁-C₆ alkyl;
[1841] R^{5a}, R^{5b}, and R^{5c} are independently selected from the group consisting of hydrogen and C₁-C₆ alkyl; or
[1842] R^{6a} and R^{6b} taken together with the nitrogen atom to which they are attached form a 4- to 8-membered heterocyclo; and R^{6c} is selected from the group consisting of hydrogen and C₁-C₆ alkyl;
[1843] R^{7a}, R^{7b}, and R^{7c} are independently selected from the group consisting of hydrogen and C₁-C₆ alkyl; or
[1844] R^{7a} and R^{7b} taken together with the nitrogen atom to which they are attached form a 4- to 8-membered heterocyclo; and R^{7c} is selected from the group consisting of hydrogen and C₁-C₆ alkyl;
[1845] R′ is selected from the group consisting of hydrogen and C₁-C₆ alkyl;
[1846] R^{8a} is -L²-R⁸;
[1847] L² is C₂-C₆ alkylenyl;
[1848] R⁸ is selected from the group consisting of —NR^{9a}R^{9b},

[chemical structure]

[1849] R^{9a} and R^{9b} are independently selected from the group consisting of hydrogen and C₁-C₆ alkyl; or
[1850] R^{9a} and R^{9b} taken together with the nitrogen atom to which they are attached form a 4- to 8-membered heterocyclo;
[1851] Q¹ is C₁-C₂₀ alkylenyl;
[1852] W¹ is selected from the group consisting of —C(═O)O—, —OC(═O)—, —C(═O)N(R^{12a})—, —N(R^{12a})C(═O)—, —OC(═O)N(R^{12a})—, —N(R^{12a})C(═O)O—, and —OC(═O)O—;
[1853] R^{12a} is selected from the group consisting of hydrogen and C₁-C₆ alkyl;
[1854] X¹ is optionally substituted C₁-C₁₅ alkylenyl; or
[1855] X¹ is a bond; Y¹ is selected from the group consisting of —(CH₂)ₘ—, —O—, —S—, and —S—S—;
[1856] m is 0, 1, 2, 3, 4, 5, or 6;
[1857] Z¹ is selected from the group consisting of optionally substituted C₄-C₁₂ cycloalkylenyl,

[chemical structure]

[1858] R¹⁰ is selected from the group consisting of hydrogen, C₁-C₂₀ alkyl, and C₂-C₂₀ alkenyl;
[1859] Q² is C₁-C₂₀ alkylenyl;
[1860] W² is selected from the group consisting of —C(═O)O—, —C(═O)N(R^{12b})—, —OC(═O)N(R^{12b})—, and —OC(═O)O—;
[1861] R^{12b} is selected from the group consisting of hydrogen and C₁-C₆ alkyl;
[1862] X² is optionally substituted C₁-C₁₅ alkylenyl; or
[1863] X² is a bond;
[1864] Y² is selected from the group consisting of —(CH₂)ₙ—, —O—, —S—, and —S—S—;
[1865] n is 0, 1, 2, 3, 4, 5, or 6;
[1866] Z² is selected from the group consisting of —(CH₂)ₚ—, optionally substituted C₄-C₁₂ cycloalkylenyl,

[chemical structure]

[1867] p is 0 or 1; and
[1868] R¹¹ is selected from the group consisting of hydrogen, C₁-C₁₀ alkyl, and C₂-C₁₀ alkenyl;
[1869] wherein one or more methylene linkages of X¹, X², Y², Y², Z¹, Z², R¹⁰, and R¹¹, are optionally and independently replaced with a group selected from —O—, —CH═CH—, —S— and C₃-C₆ cycloalkylenyl.

[1870] In one embodiment, the disclosure provides a compound of Formula IB:

[chemical structure]

[1871] or a pharmaceutically acceptable salt or solvate thereof, wherein:
[1872] A is selected from the group consisting of —N(R^{1a})— and —C(R′)—OC(═O)(R^{8a})—;
[1873] R^{1a} is -L¹-R¹;
[1874] L¹ is C₂-C₆ alkylenyl or —(CH₂)₂₋₆—OC(═O)—;
[1875] R¹ is selected from the group consisting of —OH,

[chemical structure]

[1876] R^{2a}, R^{2b}, and R^{2c} are independently selected from the group consisting of hydrogen and C₁-C₆ alkyl;
[1877] R^{3a}, R^{3b}, and R^{3c} are independently selected from the group consisting of hydrogen and C₁-C₆ alkyl;
[1878] R^{4a}, R^{4b}, and R^{4c} are independently selected from the group consisting of hydrogen and C₁-C₆ alkyl;
[1879] R^{5a}, R^{5b}, and R^{5c} are independently selected from the group consisting of hydrogen and C₁-C₆ alkyl;
[1880] R^{6a}, R^{6b}, and R^{6c} are independently selected from the group consisting of hydrogen and C₁-C₆ alkyl; or
[1881] R^{6a} and R^{6b} taken together with the nitrogen atom to which they are attached form a 4- to 8-membered heterocyclo; and R^{6c} is selected from the group consisting of hydrogen and C₁-C₆ alkyl;
[1882] R^{7a}, R^{7b}, and R^{7c} are independently selected from the group consisting of hydrogen and C₁-C₆ alkyl; or
[1883] R^{7a} and R^{7b} taken together with the nitrogen atom to which they are attached form a 4- to 8-membered heterocyclo; and R^{7c} is selected from the group consisting of hydrogen and C₁-C₆ alkyl;
[1884] R′ is selected from the group consisting of hydrogen and C₁-C₆ alkyl;
[1885] R^{8a} is -L²-R⁸;
[1886] L² is C₂-C₆ alkylenyl;
[1887] R⁸ is selected from the group consisting of —NR^{9a}R^{9b},

[chemical structure]

[1888] R^{9a} and R^{9b} are independently selected from the group consisting of hydrogen and C₁-C₆ alkyl; or
[1889] R^{9a} and R^{9b} taken together with the nitrogen atom to which they are attached form a 4- to 8-membered heterocyclo;
[1890] Q¹ is C₁-C₂₀ alkylenyl;
[1891] W¹ is selected from the group consisting of —C(═O)O—, —OC(═O)—, —C(═O)N(R^{12a})—, —N(R^{12a})C(═O)—, —OC(═O)N(R^{12a})—, —N(R^{12a})C(═O)O—, and —OC(═O)O—;
[1892] R^{12a} is selected from the group consisting of hydrogen and C₁-C₆ alkyl;
[1893] X¹ is optionally substituted C₁-C₁₅ alkylenyl; or
[1894] X¹ is a bond;
[1895] Y¹ is selected from the group consisting of —(CH₂)ₘ—, —O—, —S—, and —S—S—;
[1896] m is 0, 1, 2, 3, 4, 5, or 6;
[1897] Z¹ is selected from the group consisting of optionally substituted C₅-C₁₂ bridged cycloalkylenyl,

[chemical structure]

[1898] R¹⁰ is selected from the group consisting of hydrogen, C₁-C₂₀ alkyl, and C₂-C₂₀ alkenyl;
[1899] Q² is C₁-C₂₀ alkylenyl;
[1900] W² is selected from the group consisting of —C(═O)O—, —C(═O)N(R^{12b})—, —OC(═O)N(R^{12b})—, and —OC(═O)O—;
[1901] R^{12b} is selected from the group consisting of hydrogen and C₁-C₆ alkyl;
[1902] X² is optionally substituted C₁-C₁₅ alkylenyl; or
[1903] X² is a bond;
[1904] Y² is selected from the group consisting of —(CH₂)ₙ—, —O—, —S—, and —S—S—;
[1905] n is 0, 1, 2, 3, 4, 5, or 6;
[1906] Z² is selected from the group consisting of —(CH₂)ₚ—, optionally substituted C₄-C₁₂ cycloalkylenyl,

[chemical structure]

[1907] p is 0 or 1; and
[1908] R¹¹ is selected from the group consisting of hydrogen, C₁-C₁₀ alkyl, and C₂-C₁₀ alkenyl;
[1909] wherein one or more methylene linkages of X¹, X², Y¹, Y², Z¹, Z², R¹⁰, and R¹¹, are optionally and independently replaced with a group selected from —O—, —CH═CH—, —S— and C₃-C₆ cycloalkylenyl.

[1910] In one embodiment, the disclosure provides a compound of Formula IC:

[chemical structure]

or a pharmaceutically acceptable salt or solvate thereof, wherein:
[1911] A is selected from the group consisting of —N(R^{1a})— and —C(R′)—OC(═O)(R^{8a})—;
[1912] R^{1a} is -L¹-R¹;
[1913] L¹ is C₂-C₆ alkylenyl or —(CH₂)₂₋₆—OC(═O)—;
[1914] R¹ is selected from the group consisting of —OH,

[chemical structure]

[1915] R^{2a}, R^{2b}, and R^{2c} are independently selected from the group consisting of hydrogen and C₁-C₆ alkyl;
[1916] R^{3a}, R^{3b}, and R^{3c} are independently selected from the group consisting of hydrogen and C₁-C₆ alkyl;
[1917] R^{4a}, R^{4b}, and R^{4c} are independently selected from the group consisting of hydrogen and C₁-C₆ alkyl;
[1918] R^{5a}, R^{5b}, and R^{5c} are independently selected from the group consisting of hydrogen and C₁-C₆ alkyl;
[1919] R^{6a}, R^{6b}, and R^{6c} are independently selected from the group consisting of hydrogen and C₁-C₆ alkyl; or
[1920] R^{6a} and R^{7b} taken together with the nitrogen atom to which they are attached form a 4- to 8-membered heterocyclo; and R^{6c} is selected from the group consisting of hydrogen and C₁-C₆ alkyl;
[1921] R^{7a}, R^{7b}, and R^{7c} are independently selected from the group consisting of hydrogen and C₁-C₆ alkyl; or
[1922] R^{7a} and R^{7b} taken together with the nitrogen atom to which they are attached form a 4- to 8-membered heterocyclo; and R^{7c} is selected from the group consisting of hydrogen and C₁-C₆ alkyl;
[1923] R′ is selected from the group consisting of hydrogen and C₁-C₆ alkyl;
[1924] R^{8a} is -L²-R⁸;
[1925] L² is C₂-C₆ alkylenyl;
[1926] R⁸ is selected from the group consisting of —NR^{9a}R^{9b},

[chemical structure]

[1927] R^{9a} and R^{9b} are independently selected from the group consisting of hydrogen and C₁-C₆ alkyl; or
[1928] R^{9a} and R^{9b} taken together with the nitrogen atom to which they are attached form a 4- to 8-membered heterocyclo;
[1929] Q¹ is C₁-C₂₀ alkylenyl;
[1930] W¹ is selected from the group consisting of —C(═O)O—, —OC(═O)—, —C(═O)N(R^{12a})—, —N(R^{12a})C(═O)—, —OC(═O)N(R^{12a})—, —N(R^{12a})C(═O)O—, and —OC(═O)O—;
[1931] R^{12a} is selected from the group consisting of hydrogen and C₁-C₆ alkyl;
[1932] X¹ is optionally substituted branched C₁-C₁₅ alkylenyl; or
[1933] X¹ is a bond;
[1934] Y¹ is selected from the group consisting of —(CH₂)ₘ—, —O—, —S—, and —S—S—;
[1935] m is 0, 1, 2, 3, 4, 5, or 6;
[1936] Z¹ is selected from the group consisting of optionally substituted C₄-C₁₂ cycloalkylenyl,

[chemical structure]

[1937] R¹⁰ is selected from the group consisting of hydrogen, C₁-C₂₀ alkyl, and C₂-C₂₀ alkenyl;
[1938] Q² is C₁-C₂₀ alkylenyl;
[1939] W² is selected from the group consisting of —C(═O)O—, —C(═O)N(R^{12b})—, —OC(═O)N(R^{12b})—, and —OC(═O)O—;
[1940] R^{12b} is selected from the group consisting of hydrogen and C₁-C₆ alkyl;
[1941] X² is optionally substituted C₁-C₁₅ alkylenyl; or
[1942] Y² is selected from the group consisting of —(CH₂)ₙ—, —O—, —S—, and —S—S—;
[1943] n is 0, 1, 2, 3, 4, 5, or 6;
[1944] Z² is of —(CH₂)ₚ—;
[1945] p is 0 or 1; and
[1946] R¹¹ is C₁-C₂₀ branched alkyl;
[1947] wherein one or more methylene linkages of X¹, X², Y¹, Y², Z¹, Z², R¹⁰, and R¹¹, are optionally and independently replaced with a group selected from —O—, —CH═CH—, —S— and C₃-C₆ cycloalkylenyl.

[1948] In some embodiments, the disclosure provides a compound of any one of Formulae IA, IB, IC, or a pharmaceutically acceptable salt or solvate thereof, wherein Z¹ is optionally substituted C₅-C₁₂ bridged cycloalkylenyl.

[1949] In some embodiments, the disclosure provides a compound of any one of Formulae IA, IB, IC, or a pharmaceutically acceptable salt or solvate thereof, wherein Z¹ is not adamantyl.

[1950] In one embodiment, the disclosure provides a compound of Formula ID:

[chemical structure]

[1951] or a pharmaceutically acceptable salt or solvate thereof, wherein:
[1952] A is selected from the group consisting of —N(R^{1a})— and —C(R′)—OC(═O)(R^{8a})—;
[1953] R^{1a} is -L¹-R¹;
[1954] L¹ is C₂-C₆ alkylenyl or —(CH₂)₂₋₆—OC(═O)—;
[1955] R¹ is selected from the group consisting of —OH,

[chemical structure]

[1956] R^{2a}, R^{2b}, and R^{2c} are independently selected from the group consisting of hydrogen and C₁-C₆ alkyl;
[1957] R^{3a}, R^{3b}, and R^{3c} are independently selected from the group consisting of hydrogen and C₁-C₆ alkyl;
[1958] R^{4a}, R^{4b}, and R^{4c} are independently selected from the group consisting of hydrogen and C₁-C₆ alkyl;
[1959] R^{5a}, R^{5b}, and R^{5c} are independently selected from the group consisting of hydrogen and C₁-C₆ alkyl;
[1960] R^{6a}, R^{6b}, and R^{6c} are independently selected from the group consisting of hydrogen and C₁-C₆ alkyl; or
[1961] R^{6a} and R^{6b} taken together with the nitrogen atom to which they are attached form a 4- to 8-membered heterocyclo; and R^{6c} is selected from the group consisting of hydrogen and C₁-C₆ alkyl;
[1962] R^{7a}, R^{7b}, and R^{7c} are independently selected from the group consisting of hydrogen and C₁-C₆ alkyl; or
[1963] R^{7a} and R^{7b} taken together with the nitrogen atom to which they are attached form a 4- to 8-membered heterocyclo; and R^{7c} is selected from the group consisting of hydrogen and C₁-C₆ alkyl;
[1964] R′ is selected from the group consisting of hydrogen and C₁-C₆ alkyl;
[1965] R^{8a} is -L²-R⁸;
[1966] L² is C₂-C₆ alkylenyl;
[1967] R⁸ is selected from the group consisting of —NR^{9a}R^{9b},

[chemical structure]

[1968] R^{9a} and R^{9b} are independently selected from the group consisting of hydrogen and C₁-C₆ alkyl; or
[1969] R^{9a} and R^{9b} taken together with the nitrogen atom to which they are attached form a 4- to 8-membered heterocyclo;
[1970] Q¹ is C₁-C₂₀ alkylenyl;
[1971] W¹ is selected from the group consisting of —C(═O)O—, —OC(═O)—, —C(═O)N(R^{12a})—, —N(R^{12a})C(═O)—, —OC(═O)N(R^{12a})—, —N(R^{12a})C(═O)O—, and —OC(═O)O—;
[1972] R^{12a} is selected from the group consisting of hydrogen and C₁-C₆ alkyl;
[1973] X¹ is optionally substituted branched C₁-C₁₅ alkylenyl; or
[1974] X¹ is a bond;
[1975] Y¹ is selected from the group consisting of —(CH₂)ₘ—, —O—, —S—, and —S—S—;
[1976] m is 0, 1, 2, 3, 4, 5, or 6;
[1977] Z¹ is optionally substituted C₅-C₁₂ bridged cycloalkylenyl;
[1978] R¹⁰ is selected from the group consisting of hydrogen, C₁-C₂₀ alkyl, and C₂-C₂₀ alkenyl;
[1979] Q² is C₁-C₂₀ alkylenyl;
[1980] W² is selected from the group consisting of —C(═O)O—, —C(═O)N(R^{12b})—, —OC(═O)N(R^{12b})—, and —OC(═O)O—;
[1981] R^{12b} is selected from the group consisting of hydrogen and C₁-C₆ alkyl;
[1982] X² is optionally substituted C₁-C₁₅ alkylenyl; or
[1983] Y² is —(CH₂)ₙ—;
[1984] n is 0, 1, 2, 3, 4, 5, or 6;
[1985] Z² is of —(CH₂)ₚ—;
[1986] p is 0 or 1; and
[1987] R¹¹ is C₁-C₂₀ branched alkyl.

[1988] In some embodiments, the disclosure provides a compound of Formula ID or a pharmaceutically acceptable salt or solvate thereof, wherein Z¹ is not adamantyl.

[1989] In one embodiment, the disclosure provides a compound of Formula I:

[chemical structure]

[1990] or a pharmaceutically acceptable salt or solvate thereof, wherein:
[1991] A is selected from the group consisting of —N(R^{1a})— and —C(R′)—OC(═O)(R^{8a})—;
[1992] R^{1a} is -L¹-R¹;
[1993] L¹ is C₂-C₆ alkylenyl;
[1994] R¹ is selected from the group consisting of —OH,

[chemical structure]

[1995] R^{2a}, R^{2b}, and R^{2c} are independently selected from the group consisting of hydrogen and C₁-C₆ alkyl;
[1996] R^{3a}, R^{3b}, and R^{3c} are independently selected from the group consisting of hydrogen and C₁-C₆ alkyl;
[1997] R^{4a}, R^{4b}, and R^{4c} are independently selected from the group consisting of hydrogen and C₁-C₆ alkyl;
[1998] R^{5a}, R^{5b}, and R^{5c} are independently selected from the group consisting of hydrogen and C₁-C₆ alkyl;
[1999] R^{6a}, R^{6b}, and R^{6c} are independently selected from the group consisting of hydrogen and C₁-C₆ alkyl; or
[2000] R^{6a} and R^{6b} taken together with the nitrogen atom to which they are attached form a 4- to 8-membered heterocyclo; and R^{6c} is selected from the group consisting of hydrogen and C₁-C₆ alkyl;
[2001] R^{7a}, R^{7b}, and R^{7c} are independently selected from the group consisting of hydrogen and C₁-C₆ alkyl; or
[2002] R^{7a} and R^{7b} taken together with the nitrogen atom to which they are attached form a 4- to 8-membered heterocyclo; and R^{7c} is selected from the group consisting of hydrogen and C₁-C₆ alkyl;
[2003] R′ is selected from the group consisting of hydrogen and C₁-C₆ alkyl;
[2004] R^{8a} is -L²-R⁸;
[2005] L² is C₂-C₆ alkylenyl;
[2006] R⁸ is —NR^{9a}R^{9b};
[2007] R^{9a} and R^{9b} are independently selected from the group consisting of hydrogen and C₁-C₆ alkyl; or
[2008] R^{9a} and R^{9b} taken together with the nitrogen atom to which they are attached form a 4- to 8-membered heterocyclo;
[2009] Q¹ is C₁-C₂₀ alkylenyl;
[2010] W¹ is selected from the group consisting of —C(═O)O—, —OC(═O)—, —C(═O)N(R^{12a})—, —N(R^{12a})C(═O)—, —OC(═O)N(R^{12a})—, —N(R^{12a})C(═O)O—, and —OC(═O)O—;
[2011] R^{12a} is selected from the group consisting of hydrogen and C₁-C₆ alkyl;
[2012] X¹ is C₁-C₁₅ alkylenyl; or
[2013] X¹ is a bond;
[2014] Y¹ is selected from the group consisting of —(CH₂)ₘ—, —O—, —S—, and —S—S—;
[2015] m is 0, 1, 2, 3, 4, 5, or 6;
[2016] Z¹ is selected from the group consisting of C₄-C₁₂ cycloalkylenyl,

[chemical structure]

[2017] R¹⁰ is selected from the group consisting of hydrogen, C₁-C₂₀ alkyl, and C₂-C₂₀ alkenyl;
[2018] Q² is C₁-C₂₀ alkylenyl;
[2019] W² is selected from the group consisting of —C(═O)O—, —C(═O)N(R^{12b})—, —OC(═O)N(R^{12b})—, and —OC(═O)O—;
[2020] R^{12b} is selected from the group consisting of hydrogen and C₁-C₆ alkyl;
[2021] X² is C₁-C₁₅ alkylenyl; or
[2022] X² is a bond;
[2023] Y² is selected from the group consisting of —(CH₂)ₙ—, —O—, —S—, and —S—S—;
[2024] n is 0, 1, 2, 3, 4, 5, or 6;
[2025] Z² is selected from the group consisting of —(CH₂)ₚ—, C₄-C₁₂ cycloalkylenyl,

[chemical structure]

[2026] p is 0 or 1; and
[2027] R¹¹ is selected from the group consisting of hydrogen, C₁-C₁₀ alkyl, and C₂-C₁₀ alkenyl.

[2028] In another embodiment, the disclosure provides a compound of Formula II:

[chemical structure]

[2029] or a pharmaceutically acceptable salt or solvate thereof, wherein R¹, R¹⁰, R¹¹, Q¹, Q², W¹, W², X¹, X², Y¹, Y², Z¹, and Z² are as defined herein in Formula IA, Formula IB, Formula IC, Formula ID, Formula I, or below.

[2030] In another embodiment, the disclosure provides a compound of Formula III:

[chemical structure]

or a pharmaceutically acceptable salt or solvate thereof, wherein R′, R^{9a}, R^{9b}, R¹⁰, R¹¹, L², Q¹, Q², W¹, W², X¹, X², Y¹, Y², Z¹, and Z² are as defined herein in Formula IA, Formula IB, Formula IC, Formula ID, Formula I, or below.

[2031] In another embodiment, the disclosure provides a compound of Formula IV:

[chemical structure]

or a pharmaceutically acceptable salt or solvate thereof, wherein R′, R^{9a}, R^{9b}, R¹⁰, R¹¹, L², Q¹, Q², W¹, W², X¹, X², Y¹, Y², Z¹, and Z² are as defined herein in Formula IA, Formula IB, Formula IC, Formula ID, Formula I, or below, with the proviso that -Q¹-W¹—X¹—Y¹—Z¹—R¹⁰ is not the same as -Q²-W²—X²—Y²—Z²—R¹¹, i.e., the carbon atom bearing R′ is an asymmetrical carbon atom.

[2032] In another embodiment, the disclosure provides a compound of Formula V:

[chemical structure]

or a pharmaceutically acceptable salt or solvate thereof, wherein R′, R^{9a}, R^{9b}, R¹⁰, R¹¹, L², Q¹, Q², W¹, W², X¹, X², Y¹, Y², Z¹, and Z² are as defined herein in Formula IA, Formula IB, Formula IC, Formula ID, Formula I, or below, with the proviso that -Q¹-W¹—X¹—Y¹—Z¹—R¹⁰ is not the same as -Q²-W²—X²—Y²—Z²—R¹¹, i.e., the carbon atom bearing R′ is an asymmetrical carbon atom.

[2033] In another embodiment, the disclosure provides a compound of Formula VI:

[chemical structure]

or a pharmaceutically acceptable salt or solvate thereof, wherein R^{9a}, R^{9b}, L², Q¹, Q², X¹, X², Y¹, Y², Z¹, Z², R¹⁰, an R¹¹ are as defined herein in Formula IA, Formula IB, Formula IC, Formula ID, Formula I, or below.

[2034] In another embodiment, the disclosure provides a compound of Formula VI′:

[chemical structure]

or a pharmaceutically acceptable salt or solvate thereof, wherein R^{9a}, R^{9b}, L², Q¹, Q², X¹, X², Y¹, Y², Z¹, Z², R¹⁰, an R¹¹ are as defined herein in Formula IA, Formula IB, Formula IC, Formula ID, Formula I, or below.

[2035] In another embodiment, the disclosure provides a compound of Formula VI″:

[chemical structure]

or a pharmaceutically acceptable salt or solvate thereof, wherein R^{9a}, R^{9b}, L², Q¹, Q², X¹, X², Y¹, Y², Z¹, Z², R¹⁰, an R¹¹ are as defined herein in Formula IA, Formula IB, Formula IC, Formula ID, Formula I, or below.

[2036] In another embodiment, the disclosure provides a compound of Formula VI′″:

[chemical structure]

or a pharmaceutically acceptable salt or solvate thereof, wherein R^{9a}, R^{9b}, L², Q¹, Q², X¹, X², Y¹, Y², Z¹, Z², R¹⁰, an R¹¹ are as defined herein in Formula IA, Formula IB, Formula IC, Formula ID, Formula I, or below.

[2037] Formula IA, Formula IB, Formula IC, Formula I, In another embodiment, the disclosure provides a compound of Formula VII:

[chemical structure]

or a pharmaceutically acceptable salt or solvate thereof, wherein R¹, L¹, Q¹, Q², X¹, X², Y¹, Y², Z¹, Z², R¹⁰, an R¹¹ are as defined herein in Formula IA, Formula IB, Formula IC, Formula ID, Formula I, or below.

[2038] In another embodiment, the disclosure provides a compound of Formula VII′:

[chemical structure]

or a pharmaceutically acceptable salt or solvate thereof, wherein R¹, L¹, Q¹, Q², X¹, X², Y¹, Y², Z¹, Z², R¹⁰, an R¹¹ are as defined herein in Formula IA, Formula IB, Formula IC, Formula ID, Formula I, or below.

[2039] In another embodiment, the disclosure provides a compound of Formula VII″:

[chemical structure]

or a pharmaceutically acceptable salt or solvate thereof, wherein R¹, L¹, Q¹, Q², X¹, X², Y¹, Y², Z¹, Z², R¹⁰, an R¹¹ are as defined herein in Formula IA, Formula IB, Formula IC, Formula ID, Formula I, or below.

[2040] In another embodiment, the disclosure provides a compound of Formula VII′″:

[chemical structure]

or a pharmaceutically acceptable salt or solvate thereof, wherein R¹, L¹, Q¹, Q², X¹, X², Y¹, Y², Z¹, Z², R¹⁰, an R¹¹ are as defined herein in Formula IA, Formula IB, Formula IC, Formula ID, Formula I, or below.

[2041] Formula IA, Formula IB, Formula IC, Formula I, In another embodiment, the disclosure provides a compound of Formula VIII:

[chemical structure]

[2042] or a pharmaceutically acceptable salt or solvate thereof,
[2043] wherein
[2044] q¹ is 0, 1, 2, or 3;
[2045] q² is 0, 1, 2, or 3;
[2046] A, X¹, X², Y¹, Y², Z¹, Z², R¹⁰, an R¹¹ are as defined herein in Formula IA, Formula IB, Formula IC, Formula ID, Formula I, or below.

[2047] In certain embodiments, the compound is a compound of Formula VIII, wherein Z¹ is an optionally substituted C₅-C₁₂ bridged cycloalkylenyl.

[2048] In another embodiment, the disclosure provides a compound of Formula VIII′:

[chemical structure]

[2049] or a pharmaceutically acceptable salt or solvate thereof,
[2050] wherein
[2051] q¹ is 0, 1, 2, or 3;
[2052] q² is 0, 1, 2, or 3;
[2053] A, X¹, X², Y¹, Y², Z¹, Z², R¹⁰, an R¹¹ are as defined herein in Formula IA, Formula IB, Formula IC, Formula ID, Formula I, or below.

[2054] In certain embodiments, the compound is a compound of Formula VIII′, wherein Z¹ is an optionally substituted C₅-C₁₂ bridged cycloalkylenyl.

[2055] In another embodiment, the disclosure provides a compound of Formula VIII″:

[chemical structure]

[2056] or a pharmaceutically acceptable salt or solvate thereof,
[2057] wherein
[2058] q¹ is 0, 1, 2, or 3;
[2059] q² is 0, 1, 2, or 3;
[2060] A, X¹, X², Y¹, Y², Z¹, Z², R¹⁰, an R¹¹ are as defined herein in Formula IA, Formula IB, Formula IC, Formula ID, Formula I, or below.

[2061] In certain embodiments, the compound is a compound of Formula VIII″, wherein Z¹ is an optionally substituted C₅-C₁₂ bridged cycloalkylenyl.

[2062] In another embodiment, the disclosure provides a compound of Formula VIII′″:

[chemical structure]

[2063] or a pharmaceutically acceptable salt or solvate thereof,
[2064] wherein
[2065] q¹ is 0, 1, 2, or 3;
[2066] q² is 0, 1, 2, or 3;
[2067] A, X¹, X², Y¹, Y², Z¹, Z², R¹⁰, an R¹¹ are as defined herein in Formula IA, Formula IB, Formula IC, Formula ID, Formula I, or below.

[2068] In certain embodiments, the compound is a compound of Formula VIII′″, wherein Z¹ is an optionally substituted C₅-C₁₂ bridged cycloalkylenyl.

[2069] In another embodiment, the disclosure provides a compound of Formula IX:

[chemical structure]

[2070] or a pharmaceutically acceptable salt or solvate thereof,
[2071] wherein
[2072] q¹ is 0, 1, 2, or 3;
[2073] q² is 0, 1, 2, or 3;
[2074] L¹, X¹, X², Y¹, Y², Z¹, Z², R¹⁰, an R¹¹ are as defined herein in Formula IA, Formula IB, Formula IC, Formula ID, Formula I, or below.

[2075] In certain embodiments, the compound is a compound of Formula IX, wherein Z¹ is an optionally substituted C₅-C₁₂ bridged cycloalkylenyl.

[2076] In another embodiment, the disclosure provides a compound of Formula IX′:

[chemical structure]

[2077] or a pharmaceutically acceptable salt or solvate thereof,
[2078] wherein
[2079] q¹ is 0, 1, 2, or 3;
[2080] q² is 0, 1, 2, or 3;
[2081] L¹, X¹, X², Y¹, Y², Z¹, Z², R¹⁰, an R¹¹ are as defined herein in Formula IA, Formula IB, Formula IC, Formula ID, Formula I, or below.

[2082] In certain embodiments, the compound is a compound of Formula IX′, wherein Z¹ is an optionally substituted C₅-C₁₂ bridged cycloalkylenyl.

[2083] In another embodiment, the disclosure provides a compound of Formula IX″:

[chemical structure]

[2084] or a pharmaceutically acceptable salt or solvate thereof,
[2085] wherein
[2086] q¹ is 0, 1, 2, or 3;
[2087] q² is 0, 1, 2, or 3;
[2088] L¹, X¹, X², Y¹, Y², Z¹, Z², R¹⁰, an R¹¹ are as defined herein in Formula IA, Formula IB, Formula IC, Formula ID, Formula I, or below.

[2089] In certain embodiments, the compound is a compound of Formula IX″, wherein Z¹ is an optionally substituted C₅-C₁₂ bridged cycloalkylenyl.

[2090] In another embodiment, the disclosure provides a compound of Formula IX′″:

[chemical structure]

[2091] or a pharmaceutically acceptable salt or solvate thereof,
[2092] wherein
[2093] q¹ is 0, 1, 2, or 3;
[2094] q² is 0, 1, 2, or 3;
[2095] L¹, X¹, X², Y¹, Y², Z¹, Z², R¹⁰, an R¹¹ are as defined herein in Formula IA, Formula IB, Formula IC, Formula ID, Formula I, or below.

[2096] In certain embodiments, the compound is a compound of Formula IX′″, wherein Z¹ is an optionally substituted C₅-C₁₂ bridged cycloalkylenyl.

[2097] In another embodiment, the disclosure provides a compound of Formula X:

[chemical structure]

[2098] or a pharmaceutically acceptable salt or solvate thereof,
[2099] wherein
[2100] q¹ is 0, 1, 2, or 3;
[2101] q² is 0, 1, 2, or 3;
[2102] L¹, X¹, X², Y¹, Y², Z¹, Z², R^{9a}, R^{9b}, R¹⁰, an R¹¹ are as defined herein in Formula IA, Formula IB, Formula IC, Formula ID, Formula I or below.

[2103] In certain embodiments, the compound is a compound of Formula X, wherein Z¹ is an optionally substituted C₅-C₁₂ bridged cycloalkylenyl.

[2104] In-another embodiment, the disclosure provides a compound of Formula-X′;

[chemical structure]

[2105] or a pharmaceutically acceptable salt or solvate thereof,
[2106] wherein
[2107] q¹ is 0, 1, 2, or 3;
[2108] q² is 0, 1, 2, or 3;
[2109] L¹, X¹, X², Y¹, Y², Z¹, Z², R^{9a}, R^{9b}, R¹⁰, an R¹¹ are as defined herein in Formula IA, Formula IB, Formula IC, Formula ID, Formula I or below.

[2110] In certain embodiments, the compound is a compound of Formula X′, wherein Z¹ is an optionally substituted C₅-C₁₂ bridged cycloalkylenyl.

[2111] In another embodiment, the disclosure provides a compound of Formula X″:

[chemical structure]

[2112] or a pharmaceutically acceptable salt or solvate thereof,
[2113] wherein
[2114] q¹ is 0, 1, 2, or 3;
[2115] q² is 0, 1, 2, or 3;
[2116] L¹, X¹, X², Y¹, Y², Z¹, Z², R^{9a}, R^{9b}, R¹⁰, an R¹¹ are as defined herein in Formula IA, Formula IB, Formula IC, Formula ID, Formula I or below.

[2117] In certain embodiments, the compound is a compound of Formula X″, wherein Z¹ is an optionally substituted C₅-C₁₂ bridged cycloalkylenyl.

[2118] In another embodiment, the disclosure provides a compound of Formula X′″:

[chemical structure]

[2119] or a pharmaceutically acceptable salt or solvate thereof,
[2120] wherein
[2121] q¹ is 0, 1, 2, or 3;
[2122] q² is 0, 1, 2, or 3;
[2123] L¹, X¹, X², Y¹, Y², Z¹, Z², R^{9a}, R^{9b}, R¹⁰, an R¹¹ are as defined herein in Formula IA, Formula IB, Formula IC, Formula ID, Formula I or below.

[2124] In certain embodiments, the compound is a compound of Formula X′″, wherein Z¹ is an optionally substituted C₅-C₁₂ bridged cycloalkylenyl.

[2125] In another embodiment, the disclosure provides a compound of Formula XI:

[chemical structure]

[2126] or a pharmaceutically acceptable salt or solvate thereof,
[2127] wherein
[2128] q¹ is 0, 1, 2, or 3;
[2129] q² is 0, 1, 2, or 3;
[2130] r² is 0, 1, or 2;
[2131] s² is 0, 1, 2, 3, 4, 5, 6; and
[2132] A, X¹, Y¹, Z¹, R¹⁰, and R¹¹ are as defined herein in Formula IA, Formula IB, Formula IC, Formula ID, Formula I, or below.

[2133] In certain embodiments, the compound is a compound of Formula XI, wherein Z¹ is an optionally substituted C₅-C₁₂ bridged cycloalkylenyl.

[2134] In another embodiment, the disclosure provides a compound of Formula XI′:

[chemical structure]

[2135] or a pharmaceutically acceptable salt or solvate thereof,
[2136] wherein
[2137] q¹ is 0, 1, 2, or 3;
[2138] q² is 0, 1, 2, or 3;
[2139] r² is 0, 1, or 2;
[2140] s² is 0, 1, 2, 3, 4, 5, 6; and
[2141] A, X¹, Y¹, Z¹, R¹⁰, and R¹¹ are as defined herein in Formula IA, Formula IB, Formula IC, Formula ID, Formula I, or below.

[2142] In certain embodiments, the compound is a compound of Formula XI′, wherein Z¹ is an optionally substituted C₅-C₁₂ bridged cycloalkylenyl.

[2143] In another embodiment, the disclosure provides a compound of Formula XI″:

[chemical structure]

[2144] or a pharmaceutically acceptable salt or solvate thereof,
[2145] wherein
[2146] q¹ is 0, 1, 2, or 3;
[2147] q² is 0, 1, 2, or 3;
[2148] r² is 0, 1, or 2;
[2149] s² is 0, 1, 2, 3, 4, 5, 6; and
[2150] A, X¹, Y¹, Z¹, R¹⁰, and R¹¹ are as defined herein in Formula IA, Formula IB, Formula IC, Formula ID, Formula I, or below.

[2151] In certain embodiments, the compound is a compound of Formula XI″, wherein Z¹ is an optionally substituted C₅-C₁₂ bridged cycloalkylenyl.

[2152] In another embodiment, the disclosure provides a compound of Formula XI′″:

[chemical structure]

[2153] or a pharmaceutically acceptable salt or solvate thereof,
[2154] wherein
[2155] q¹ is 0, 1, 2, or 3;
[2156] q² is 0, 1, 2, or 3;
[2157] r² is 0, 1, or 2;
[2158] s² is 0, 1, 2, 3, 4, 5, 6; and
[2159] A, X¹, Y¹, Z¹, R¹⁰, and R¹¹ are as defined herein in Formula IA, Formula IB, Formula IC, Formula ID, Formula I, or below.

[2160] In certain embodiments, the compound is a compound of Formula XI′″, wherein Z¹ is an optionally substituted C₅-C₁₂ bridged cycloalkylenyl.

[2161] In another embodiment, the disclosure provides a compound of Formula XII:

[chemical structure]

[2162] or a pharmaceutically acceptable salt or solvate thereof,
[2163] wherein
[2164] q¹ is 0, 1, 2, or 3;
[2165] q² is 0, 1, 2, or 3;
[2166] r² is 0, 1, or 2;
[2167] s² is 0, 1, 2, 3, 4, 5, 6; and
[2168] L¹, X¹, Y¹, Z¹, R¹⁰ and R¹¹ are as defined herein in Formula IA, Formula IB, Formula IC, Formula ID, Formula I, or below.

[2169] In certain embodiments, the compound is a compound of Formula XII, wherein Z¹ is an optionally substituted C₅-C₁₂ bridged cycloalkylenyl.

[2170] In another embodiment, the disclosure provides a compound of Formula XII′:

[chemical structure]

[2171] or a pharmaceutically acceptable salt or solvate thereof,
[2172] wherein
[2173] q¹ is 0, 1, 2, or 3;
[2174] q² is 0, 1, 2, or 3;
[2175] r² is 0, 1, or 2;
[2176] s² is 0, 1, 2, 3, 4, 5, 6; and
[2177] L¹, X¹, Y¹, Z¹, R¹⁰ and R¹¹ are as defined herein in Formula IA, Formula IB, Formula IC, Formula ID, Formula I, or below.

[2178] In certain embodiments, the compound is a compound of Formula XII′, wherein Z¹ is an optionally substituted C₅-C₁₂ bridged cycloalkylenyl.

[2179] In another embodiment, the disclosure provides a compound of Formula XII″:

[chemical structure]

[2180] or a pharmaceutically acceptable salt or solvate thereof,
[2181] wherein
[2182] q¹ is 0, 1, 2, or 3;
[2183] q² is 0, 1, 2, or 3;
[2184] r² is 0, 1, or 2;
[2185] s² is 0, 1, 2, 3, 4, 5, 6; and
[2186] L¹, X¹, Y¹, Z¹, R¹⁰ and R¹¹ are as defined herein in Formula IA, Formula IB, Formula IC, Formula ID, Formula I or below.

[2187] In certain embodiments, the compound is a compound of Formula XII″, wherein Z¹ is an optionally substituted C₅-C₁₂ bridged cycloalkylenyl.

[2188] In another embodiment, the disclosure provides a compound of Formula XII′″:

[chemical structure]

[2189] or a pharmaceutically acceptable salt or solvate thereof,
[2190] wherein
[2191] q¹ is 0, 1, 2, or 3;
[2192] q² is 0, 1, 2, or 3;
[2193] r² is 0, 1, or 2;
[2194] s² is 0, 1, 2, 3, 4, 5, 6; and
[2195] L¹, X¹, Y¹, Z¹, R¹⁰ and R¹¹ are as defined herein in Formula IA, Formula IB, Formula IC, Formula ID, Formula I or below.

[2196] In certain embodiments, the compound is a compound of Formula XII′″, wherein Z¹ is an optionally substituted C₅-C₁₂ bridged cycloalkylenyl.

[2197] In another embodiment, the disclosure provides a compound of Formula XIII:

[chemical structure]

[2198] or a pharmaceutically acceptable salt or solvate thereof,
[2199] wherein
[2200] q¹ is 0, 1, 2, or 3;
[2201] q² is 0, 1, 2, or 3;
[2202] r² is 0, 1, or 2;
[2203] s² is 0, 1, 2, 3, 4, 5, 6; and
[2204] L¹, X¹, Y¹, Z¹, R^{9a}, R^{9b}, R¹⁰ and R¹¹ are as defined herein in Formula IA, Formula IB, Formula IC, Formula I or below.

[2205] In certain embodiments, the compound is a compound of Formula XIII, wherein Z¹ is an optionally substituted C₅-C₁₂ bridged cycloalkylenyl.

[2206] In another embodiment, the disclosure provides a compound of Formula XIII′:

[chemical structure]

[2207] or a pharmaceutically acceptable salt or solvate thereof,
[2208] wherein
[2209] q¹ is 0, 1, 2, or 3;
[2210] q² is 0, 1, 2, or 3;
[2211] r² is 0, 1, or 2;
[2212] s² is 0, 1, 2, 3, 4, 5, 6; and
[2213] L¹, X¹, Y¹, Z¹, R^{9a}, R^{9b}, R¹⁰ and R¹¹ are as defined herein in Formula IA, Formula IB, Formula IC, Formula ID, Formula I, or below.

[2214] In certain embodiments, the compound is a compound of Formula XIII′, wherein Z¹ is an optionally substituted C₅-C₁₂ bridged cycloalkylenyl.

[2215] In another embodiment, the disclosure provides a compound of Formula XIII″:

[chemical structure]

[2216] or a pharmaceutically acceptable salt or solvate thereof,
[2217] wherein
[2218] q¹ is 0, 1, 2, or 3;
[2219] q² is 0, 1, 2, or 3;
[2220] r² is 0, 1, or 2;
[2221] s² is 0, 1, 2, 3, 4, 5, 6; and
[2222] L¹, X¹, Y¹, Z¹, R^{9a}, R^{9b}, R¹⁰ and R¹¹ are as defined herein in Formula IA, Formula IB, Formula IC, Formula ID, Formula I, or below.

[2223] In certain embodiments, the compound is a compound of Formula XIII″, wherein Z¹ is an optionally substituted C₅-C₁₂ bridged cycloalkylenyl.

[2224] In another embodiment, the disclosure provides a compound of Formula XIII′″:

[chemical structure]

[2225] or a pharmaceutically acceptable salt or solvate thereof,
[2226] wherein
[2227] q¹ is 0, 1, 2, or 3;
[2228] q² is 0, 1, 2, or 3;
[2229] r² is 0, 1, or 2;
[2230] s² is 0, 1, 2, 3, 4, 5, 6; and
[2231] L¹, X¹, Y¹, Z¹, R^{9a}, R^{9b}, R¹⁰ and R¹¹ are as defined herein in Formula IA, Formula IB, Formula IC, Formula ID, Formula I or below.

[2232] In certain embodiments, the compound is a compound of Formula XIII′″, wherein Z¹ is an optionally substituted C₅-C₁₂ bridged cycloalkylenyl.

[2233] In another embodiment, the disclosure provides a compound of Formula XIV:

[chemical structure]

[2234] or a pharmaceutically acceptable salt or solvate thereof,
[2235] wherein
[2236] R^{11′} is selected from the group consisting of hydrogen, C₁-C₁₀ alkyl, and C₂-C₁₀ alkenyl;
[2237] q¹ is 0, 1, 2, or 3;
[2238] q² is 0, 1, 2, or 3;
[2239] r² is 0, 1, or 2;
[2240] s² is 0, 1, 2, 3, 4, 5, 6; and
[2241] A, X¹, Y¹, Z¹, R¹⁰, and R¹¹ are as defined herein in Formula IA, Formula IB, Formula IC, Formula ID, Formula I, or below.

[2242] In certain embodiments, the compound is a compound of Formula XIV, wherein Z¹ is an optionally substituted C₅-C₁₂ bridged cycloalkylenyl. In certain embodiments, Z¹ is not adamantyl.

[2243] In another embodiment, the disclosure provides a compound of Formula XIV′:

[chemical structure]

[2244] or a pharmaceutically acceptable salt or solvate thereof,
[2245] wherein
[2246] R^{11′} is selected from the group consisting of hydrogen, C₁-C₁₀ alkyl, and C₂-C₁₀ alkenyl;
[2247] q¹ is 0, 1, 2, or 3;
[2248] q² is 0, 1, 2, or 3;
[2249] r² is 0, 1, or 2;
[2250] s² is 0, 1, 2, 3, 4, 5, 6; and
[2251] A, X¹, Y¹, Z¹, R¹⁰, and R¹¹ are as defined herein in Formula IA, Formula IB, Formula IC, Formula ID, Formula I, or below.

[2252] In certain embodiments, the compound is a compound of Formula XIV′, wherein Z¹ is an optionally substituted C₅-C₁₂ bridged cycloalkylenyl. In certain embodiments, Z¹ is not adamantyl.

[2253] In another embodiment, the disclosure provides a compound of Formula XIV″:

[chemical structure]

[2254] or a pharmaceutically acceptable salt or solvate thereof,
[2255] wherein
[2256] R^{11′} is selected from the group consisting of hydrogen, C₁-C₁₀ alkyl, and C₂-C₁₀ alkenyl;
[2257] q¹ is 0, 1, 2, or 3;
[2258] q² is 0, 1, 2, or 3;
[2259] r² is 0, 1, or 2;
[2260] s² is 0, 1, 2, 3, 4, 5, 6; and
[2261] A, X¹, Y¹, Z¹, R¹⁰, and R¹¹ are as defined herein in Formula IA, Formula IB, Formula IC, Formula ID, Formula I or below.

[2262] In certain embodiments, the compound is a compound of Formula XIV″, wherein Z¹ is an optionally substituted C₅-C₁₂ bridged cycloalkylenyl. In certain embodiments, Z¹ is not adamantyl.

[2263] In another embodiment, the disclosure provides a compound of Formula XIV′″:

[chemical structure]

[2264] or a pharmaceutically acceptable salt or solvate thereof,
[2265] wherein R^{11′} is selected from the group consisting of hydrogen, C₁-C₁₀ alkyl, and C₂-C₁₀ alkenyl;
[2266] q¹ is 0, 1, 2, or 3;
[2267] q² is 0, 1, 2, or 3;
[2268] r² is 0, 1, or 2;
[2269] s² is 0, 1, 2, 3, 4, 5, 6; and
[2270] A, X¹, Y¹, Z¹, R¹⁰, and R¹¹ are as defined herein in Formula IA, Formula IB, Formula IC, Formula ID, Formula I or below.

[2271] In certain embodiments, the compound is a compound of Formula XIV′″, wherein Z¹ is an optionally substituted C₅-C₁₂ bridged cycloalkylenyl. In certain embodiments, Z¹ is not adamantyl.

[2272] In another embodiment, the disclosure provides a compound of Formula XV:

[chemical structure]

[2273] or a pharmaceutically acceptable salt or solvate thereof,
[2274] wherein
[2275] R^{11′} is selected from the group consisting of hydrogen, C₁-C₁₀ alkyl, and C₂-C₁₀ alkenyl;
[2276] q¹ is 0, 1, 2, or 3;
[2277] q² is 0, 1, 2, or 3;
[2278] r² is 0, 1, or 2;
[2279] s² is 0, 1, 2, 3, 4, 5, 6; and
[2280] L¹, X¹, Y¹, Z¹, R¹⁰ and R¹¹ are as defined herein in Formula IA, Formula IB, Formula, IC, Formula I or below;
[2281] wherein Z¹ is not adamantyl.

[2282] In another embodiment, the disclosure provides a compound of Formula XV′:

[chemical structure]

[2283] or a pharmaceutically acceptable salt or solvate thereof,
[2284] wherein R^{11′} is selected from the group consisting of hydrogen, C₁-C₁₀ alkyl, and C₂-C₁₀ alkenyl;
[2285] q¹ is 0, 1, 2, or 3;
[2286] q² is 0, 1, 2, or 3;
[2287] r² is 0, 1, or 2;
[2288] s² is 0, 1, 2, 3, 4, 5, 6; and
[2289] L¹, X¹, Y¹, Z¹, R¹⁰ and R¹¹ are as defined herein in Formula IA, Formula IB, Formula, IC, Formula I or below;
[2290] wherein Z¹ is not adamantyl.

[2291] In another embodiment, the disclosure provides a compound of Formula XV″:

[chemical structure]

[2292] or a pharmaceutically acceptable salt or solvate thereof,
[2293] wherein R^{11′} is selected from the group consisting of hydrogen, C₁-C₁₀ alkyl, and C₂-C₁₀ alkenyl;
[2294] q¹ is 0, 1, 2, or 3;
[2295] q² is 0, 1, 2, or 3;
[2296] r² is 0, 1, or 2;
[2297] s² is 0, 1, 2, 3, 4, 5, 6; and
[2298] L¹, X¹, Y¹, Z¹, R¹⁰ and R¹¹ are as defined herein in Formula IA, Formula IB, Formula, IC, Formula I or below;
[2299] wherein Z¹ is not adamantyl.

[2300] In another embodiment, the disclosure provides a compound of Formula XV′″:

[chemical structure]

[2301] or a pharmaceutically acceptable salt or solvate thereof,
[2302] wherein R^{11′} is selected from the group consisting of hydrogen, C₁-C₁₀ alkyl, and C₂-C₁₀ alkenyl;
[2303] q¹ is 0, 1, 2, or 3;
[2304] q² is 0, 1, 2, or 3;
[2305] r² is 0, 1, or 2;
[2306] s² is 0, 1, 2, 3, 4, 5, 6; and
[2307] L¹, X¹, Y¹, Z¹, R¹⁰ and R¹¹ are as defined herein in Formula IA, Formula IB, Formula, IC, Formula I or below;
[2308] wherein Z¹ is not adamantyl.

[2309] In another embodiment, the disclosure provides a compound of Formula XVI:

[chemical structure]

[2310] or a pharmaceutically acceptable salt or solvate thereof,
[2311] wherein R^{11′} is selected from the group consisting of hydrogen, C₁-C₁₀ alkyl, and C₂-C₁₀ alkenyl;
[2312] q¹ is 0, 1, 2, or 3;
[2313] q² is 0, 1, 2, or 3;
[2314] r² is 0, 1, or 2;
[2315] s² is 0, 1, 2, 3, 4, 5, 6; and
[2316] L¹, X¹, Y¹, Z¹, R^{9a}, R^{9b}, R¹⁰ and R¹¹ are as defined herein in Formula IA, Formula IB, Formula IC, Formula ID, Formula I, or below.

[2317] In another embodiment, the disclosure provides a compound of Formula XVI′:

[chemical structure]

[2318] or a pharmaceutically acceptable salt or solvate thereof,
[2319] wherein
[2320] R^{11′} is selected from the group consisting of hydrogen, C₁-C₁₀ alkyl, and C₂-C₁₀ alkenyl;
[2321] q¹ is 0, 1, 2, or 3;
[2322] q² is 0, 1, 2, or 3;
[2323] r² is 0, 1, or 2;
[2324] s² is 0, 1, 2, 3, 4, 5, 6; and
[2325] L¹, X¹, Y¹, Z¹, R^{9a}, R^{9b}, R¹⁰ and R¹¹ are as defined herein in Formula IA, Formula IB, Formula IC, Formula ID, Formula I, or below.

[2326] In another embodiment, the disclosure provides a compound of Formula XVI″:

[chemical structure]

[2327] or a pharmaceutically acceptable salt or solvate thereof,
[2328] wherein R^{11′} is selected from the group consisting of hydrogen, C₁-C₁₀ alkyl, and C₂-C₁₀ alkenyl;
[2329] q¹ is 0, 1, 2, or 3;
[2330] q² is 0, 1, 2, or 3;
[2331] r² is 0, 1, or 2;
[2332] s² is 0, 1, 2, 3, 4, 5, 6; and
[2333] L¹, X¹, Y¹, Z¹, R^{9a}, R^{9b}, R¹⁰ and R¹¹ are as defined herein in Formula IA, Formula IB, Formula IC, Formula ID, Formula I, or below.

[2334] In another embodiment, the disclosure provides a compound of Formula XVI′″:

[chemical structure]

[2335] or a pharmaceutically acceptable salt or solvate thereof,
[2336] wherein
[2337] R^{11′} is selected from the group consisting of hydrogen, C₁-C₁₀ alkyl, and C₂-C₁₀ alkenyl;
[2338] q¹ is 0, 1, 2, or 3;
[2339] q² is 0, 1, 2, or 3;
[2340] r² is 0, 1, or 2;
[2341] s² is 0, 1, 2, 3, 4, 5, 6; and
[2342] L¹, X¹, Y¹, Z¹, R^{9a}, R^{9b}, R¹⁰ and R¹¹ are as defined herein in Formula IA, Formula IB, Formula IC, Formula ID, Formula I, or below.

[2343] In another embodiment, the disclosure provides a compound of Formula XVII:

[chemical structure]

[2344] or a pharmaceutically acceptable salt or solvate thereof,
[2345] wherein
[2346] q¹ is 0, 1, 2, or 3;
[2347] q² is 0, 1, 2, or 3;
[2348] A, X¹, X², Y¹, Y², Z¹, Z², R¹⁰, and R¹¹ are as defined herein in Formula IA, Formula IB, Formula IC, Formula ID, Formula I, or below.

[2349] In certain embodiments, the compound is a compound of Formula XVII, wherein one or more methylene linkages of X², Y², Z², and R¹¹, are not replaced with a group selected from —O—, —CH═CH—, —S— and C₃-C₆ cycloalkylenyl.

[2350] In another embodiment, the disclosure provides a compound of Formula XVIII:

[chemical structure]

[2351] or a pharmaceutically acceptable salt or solvate thereof,
[2352] wherein
[2353] q¹ is 0, 1, 2, or 3;
[2354] q² is 0, 1, 2, or 3;
[2355] L¹, X¹, X², Y¹, Y², Z², an R¹¹ are as defined herein in Formula IA, Formula IB, Formula IC, Formula ID, Formula I, or below.

[2356] In certain embodiments, the compound is a compound of Formula XVIII, wherein one or more methylene linkages of X², Y², Z², and R¹¹, are not replaced with a group selected from —O—, —CH═CH—, —S— and C₃-C₆ cycloalkylenyl.

[2357] In another embodiment, the disclosure provides a compound of Formula XVIII′:

[chemical structure]

[2358] or a pharmaceutically acceptable salt or solvate thereof,
[2359] wherein
[2360] q¹ is 0, 1, 2, or 3;
[2361] q² is 0, 1, 2, or 3;
[2362] A, X¹, X², Y¹, Y², Z¹, Z², R¹⁰, and R¹¹ are as defined herein in Formula IA, Formula IB, Formula IC, Formula ID, Formula I, or below.

[2363] In another embodiment, the disclosure provides a compound of Formula XIX:

[chemical structure]

[2364] or a pharmaceutically acceptable salt or solvate thereof,
[2365] wherein
[2366] q¹ is 0, 1, 2, or 3;
[2367] q² is 0, 1, 2, or 3;
[2368] A, X¹, X², Y¹, Y², Z¹, Z², R¹⁰, an R¹¹ are as defined herein in Formula IA, Formula IB, Formula IC, Formula ID, Formula I, or below.

[2369] In another embodiment, the disclosure provides a compound of Formula XX:

[chemical structure]

[2370] or a pharmaceutically acceptable salt or solvate thereof,
[2371] wherein
[2372] q¹ is 0, 1, 2, or 3;
[2373] q² is 0, 1, 2, or 3;
[2374] L¹, X¹, X², Y¹, Y², Z², an R¹¹ are as defined herein in Formula IA, Formula IB, Formula IC, Formula ID, Formula I, or below.

[2375] In another embodiment, the disclosure provides a compound of Formula XXI:

[chemical structure]

[2376] or a pharmaceutically acceptable salt or solvate thereof,
[2377] wherein
[2378] q¹ is 0, 1, 2, or 3;
[2379] q² is 0, 1, 2, or 3;
[2380] A, X¹, X², Y¹, Y², Z¹, Z², R¹⁰, an R¹¹ are as defined herein in Formula IA, Formula IB, Formula IC, Formula ID, Formula I, or below.

### L¹

[2381] In another embodiment, L¹ is selected from the group consisting of —CH₂CH₂—, —CH₂CH₂CH₂—, and —CH₂CH₂CH₂CH₂—. In another embodiment, L¹ is —CH₂CH₂—. In another embodiment, L¹ is —CH₂CH₂CH₂—. In another embodiment, L¹ is —CH₂CH₂CH₂CH₂—. In certain embodiments, L¹ is —(CH₂)₂₋₆—OC(═O)—. In some embodiments, L¹ is —(CH₂)₂—OC(═O)—.

### R¹

[2382] In another embodiment, R¹ is

[chemical structure]

In some embodiments, R¹ is

[chemical structure]

In another embodiment, R^{2a}, R^{2b}, and R^{2c} are independently selected from the group consisting of hydrogen and methyl. In another embodiment, R^{2a}, R^{2b}, and R^{2c} are independently hydrogen. In another embodiment, R^{2a}, R^{2b}, and R^{2c} are independently methyl.

[2383] In another embodiment, R¹ is

[chemical structure]

In another embodiment, R^{3a}, R^{3b}, and R^{3c} are independently selected from the group consisting of hydrogen and methyl. In another embodiment, R^{3a}, R^{3b}, and R^{3c} are independently hydrogen. In another embodiment, R^{3a}, R^{3b}, and R^{3c} are independently methyl.

[2384] In another embodiment, R¹ is

[chemical structure]

In another embodiment, R^{4a}, R^{4b}, and R^{4c} are independently selected from the group consisting of hydrogen and methyl. In another embodiment, R^{4a}, R^{4b}, and R^{4c} are independently hydrogen. In another embodiment, R^{4a}, R^{4b}, and R^{4c} are independently methyl.

[2385] In another embodiment, R¹ is

[chemical structure]

In another embodiment, R^{5a}, R^{5b}, and R^{5c} are independently selected from the group consisting of hydrogen and methyl. In another embodiment, R^{5a}, R^{5b}, and R^{5c} are independently hydrogen. In another embodiment, R^{5a}, R^{5b}, and R^{5c} are independently methyl.

[2386] In another embodiment, R¹ is

[chemical structure]

In some embodiments, R¹ is

[chemical structure]

In another embodiment, R^{3b}, and R^{3c} are independently selected from the group consisting of hydrogen and methyl. In another embodiment, R^{3b}, and R^{3c} are independently hydrogen. In another embodiment, R^{3b}, and R^{3c} are independently methyl.

[2387] In another embodiment, R¹ is

[chemical structure]

In some embodiments, R¹ is

[chemical structure]

In another embodiment, R^{5b}, and R^{5c} are independently selected from the group consisting of hydrogen and methyl. In another embodiment, R^{5b}, and R^{5c} are independently hydrogen. In another embodiment, R^{5b}, and R^{5c} are independently methyl.

[2388] In another embodiment, R¹ is —OH.

[2389] In some embodiments, R¹ is —N(R^{9a})(R^{9b}). In some embodiments, R¹ is —NMe₂. In some embodiments, R¹ is —NEt₂.

[2390] In another embodiment, R¹ is

[chemical structure]

[2391] In another embodiment, R¹ is

[chemical structure]

### L²

[2392] In another embodiment, L² is selected from the group consisting of —CH₂CH₂—, —CH₂CH₂CH₂—, and —CH₂CH₂CH₂CH₂—. In another embodiment, L² is —CH₂CH₂—. In another embodiment, L² is —CH₂CH₂CH₂—. In another embodiment, L² is —CH₂CH₂CH₂CH₂—.

### R⁸

[2393] In another embodiment, R⁸ is

[chemical structure]

In some embodiments, R⁸ is

[chemical structure]

In another embodiment, R^{2a}, R^{2b}, and R^{2c} are independently selected from the group consisting of hydrogen and methyl. In another embodiment, R^{2a}, R^{2b}, and R^{2c} are independently hydrogen. In another embodiment, R^{2a}, R^{2b}, and R^{2c} are independently methyl.

[2394] In another embodiment, R⁸ is

[chemical structure]

In another embodiment, R^{3a}, R^{3b}, and R^{3c} are independently selected from the group consisting of hydrogen and methyl. In another embodiment, R^{3a}, R^{3b}, and R^{3c} are independently hydrogen. In another embodiment, R^{3a}, R^{3b}, and R^{3c} are independently methyl.

[2395] In another embodiment, R⁸ is

[chemical structure]

In another embodiment, R^{4a}, R^{4b}, and R^{4c} are independently selected from the group consisting of hydrogen and methyl. In another embodiment, R^{4a}, R^{4b}, and R^{4c} are independently hydrogen. In another embodiment, R^{4a}, R^{4b}, and R^{4c} are independently methyl.

[2396] In another embodiment, R⁸ is

[chemical structure]

In another embodiment, R^{5a}, R^{5b}, and R^{5c} are independently selected from the group consisting of hydrogen and methyl. In another embodiment, R^{5a}, R^{5b}, and R^{5c} are independently hydrogen. In another embodiment, R^{5a}, R^{5b}, and R^{5c} are independently methyl.

[2397] In another embodiment, R⁸ is

[chemical structure]

In some embodiments, R⁸ is

[chemical structure]

In another embodiment, R^{3b}, and R^{3c} are independently selected from the group consisting of hydrogen and methyl. In another embodiment, R^{3b}, and R^{3c} are independently hydrogen. In another embodiment, R^{3b}, and R^{3c} are independently methyl.

[2398] In another embodiment, R⁸ is

[chemical structure]

In some embodiments, R⁸ is

[chemical structure]

In another embodiment, R^{5b}, and R^{5c} are independently selected from the group consisting of hydrogen and methyl. In another embodiment, R^{5b}, and R^{5c} are independently hydrogen. In another embodiment, R^{5b}, and R^{5c} are independently methyl.

[2399] In another embodiment, R⁸ is —NR^{9a}R^{9b}. In some embodiments, R⁸ is —NMe₂. In some embodiments, R⁸ is —NEt₂.

[2400] In another embodiment, R⁸ is —OH.

R^{9a}, R^{9b}

[2401] In another embodiment, R^{9a} and R^{9b} are independently selected from the group consisting of hydrogen and C₁-C₄ alkyl. In another embodiment, R^{9a} and R^{9b} are each methyl. In another embodiment, R^{9a} and R^{9b} are each ethyl.

### R′

[2402] In another embodiment, R′ is hydrogen. In some embodiments, R′ is C₁-C₆ alkyl.

### Q¹

[2403] In another embodiment, Q¹ is straight chain C₁-C₂₀ alkylenyl. In another embodiment, Q¹ is straight chain C₁-C₁₀ alkylenyl. In another embodiment, Q¹ is C₁-C₁₀ alkylenyl. In another embodiment, Q¹ is C₂-C₅ alkylenyl. Q¹ is C₆-C₉ alkylenyl. In another embodiment, Q¹ is selected from the group consisting of —CH₂CH₂—, —CH₂CH₂CH₂—, —CH₂(CH₂)₂CH₂—, —CH₂(CH₂)₃CH₂—, —CH₂(CH₂)₄CH₂—, —CH₂(CH₂)₅CH₂—, —CH₂(CH₂)₆CH₂—, —CH₂(CH₂)₇CH₂—, and —CH₂(CH₂)₈CH₂—. In another embodiment, Q¹ is —CH₂CH₂—. In another embodiment, Q¹ is —CH₂CH₂CH₂—. In another embodiment, Q¹ is —CH₂(CH₂)₂CH₂—. In another embodiment, Q¹ is —CH₂(CH₂)₃CH₂—. In another embodiment, Q¹ is —CH₂CH₂—. In another embodiment, Q¹ is —CH₂(CH₂)₄CH₂—. In another embodiment, Q¹ is —CH₂(CH₂)₅CH₂—. In another embodiment, Q¹ is —CH₂(CH₂)₆CH₂—. In another embodiment, Q¹ is —CH₂(CH₂)₇CH₂—. In another embodiment, Q¹ is —CH₂(CH₂)₈·CH₂—.

### W¹

[2404] In another embodiment, W¹ is selected from the group consisting of —C(═O)O—, —OC(═O)—, —C(═O)N(R^{12a})—, —N(R^{12a})C(═O)—, —OC(═O)N(R^{12a})—, —N(R^{12a})C(═O)O—, and —OC(═O)O—. In another embodiment, W¹ is —C(═O)O—. In another embodiment, W¹ is —OC(═O)—. In another embodiment, W¹ is —C(═O)N(R^{12a})—. In another embodiment, W¹ is —N(R^{12a})C(═O)—. In another embodiment, W¹ is —OC(═O)N(R^{12a})—. In another embodiment, W¹ is —N(R^{12a})C(═O)O—. In another embodiment, W¹ is —OC(═O)O—.

### X¹

[2405] In another embodiment, X² is optionally substituted C₁-C₁₅ alkylenyl. In another embodiment, X² is branched C₁-C₁₅ alkylenyl. In another embodiment, X¹ is a bond or C₁-C₁₅ alkylenyl.

[2406] In another embodiment, X¹ is a bond. In another embodiment, X¹ is C₂-C₅ alkylenyl. In another embodiment, X¹ is C₆-C₉ alkylenyl. In another embodiment, X¹ is —CH₂—. In another embodiment, X² is —CH₂CH₂—. In another embodiment, X² is —CH₂CH₂CH₂—. In another embodiment, X² is —CH₂CH₂CH₂CH₂—.

[2407] In another embodiment, X² is —CH₂CH₂CH₂CH₂CH₂—.

### Y¹

[2408] In another embodiment, Y¹ is selected from the group consisting of —(CH₂)ₘ—, —O—, —S—, and —S—S—. In another embodiment, Y¹ is —(CH₂)ₘ—. In some embodiments, Y¹ is —O—. In some embodiments, Y¹ is —S—. In another embodiment, Y¹ is —CH₂—. In another embodiment, Y² is —CH₂CH₂—.

m

[2409] In another embodiment, m is 0. In another embodiment, m is 1. In another embodiment, m is 2. In another embodiment, m is 3. In another embodiment, m is 4. In another embodiment, m is 5. In another embodiment, m is 6.

n

[2410] In another embodiment, n is 0. In another embodiment, n is 1. In another embodiment, n is 2. In another embodiment, n is 3. In another embodiment, n is 4. In another embodiment, n is 5. In another embodiment, n is 6.

p

[2411] In another embodiment, p is 0. In another embodiment, p is 1.

### Z¹

[2412] In another embodiment, Z¹ is selected from the group consisting of C₄-C₁₂ cycloalkylenyl,

[chemical structure]

In certain embodiments, Z¹ is optionally substituted.

[2413] In another embodiment, Z¹ is

[chemical structure]

[2414] In another embodiment, Z¹ is C₄-C₁₂ cycloalkylenyl. In another embodiment, Z¹ is a monocyclic C₄-C₈ cycloalkylenyl. In another embodiment, Z¹ is a monocyclic C₄-C₆ cycloalkylenyl. In another embodiment, Z¹ is a monocyclic C₄ cycloalkylenyl. In another embodiment, Z¹ is a monocyclic C₅ cycloalkylenyl. In another embodiment, Z¹ is a monocyclic C₆ cycloalkylenyl.

[2415] In another embodiment, Z¹ is an optionally substituted bridged bicyclic or multicyclic cycloalkylenyl. In some embodiments, Z¹ is optionally substituted C₅-C₁₂ bridged cycloalkylenyl. In some embodiments, Z¹ is optionally substituted C₆-C₁₀ bridged cycloalkylenyl. In some embodiments, Z¹ is a optionally substituted C₆-C₁₀ bridged cycloalkylenyl. selected from the group consisting of adamantyl, cubanyl, bicyclo[2.2.1]heptyl, bicyclo[2.2.2]octyl, bicyclo[1.1.1]pentyl, bicyclo[3.2.1]octyl, and bicyclo[3.1.1]heptyl.

[2416] In another embodiment, Z¹ is selected from the group consisting of:

[chemical structure]

[2417] In another embodiment, Z¹ is selected from the group consisting of:

[chemical structure]

[2418] In some embodiments, Z¹ is adamantyl. In another embodiment, Z¹ is

[chemical structure]

In some embodiments, Z¹ is bicyclo[2.2.2]octyl. In another embodiment, Z¹ is

[chemical structure]

In some embodiments, Z¹ is cubanyl. In another embodiment, Z¹ is

[chemical structure]

In some embodiments, Z¹ is bicyclo[1.1.1]pentyl. In another embodiment, Z¹ is

[chemical structure]

In some embodiments, Z¹ is bicyclo[2.2.1]heptyl. In another embodiment, Z¹ is

[chemical structure]

[2419] In another embodiment, Z¹ is selected from the group consisting of:

[chemical structure]

[2420] In another embodiment, Z¹ is

[chemical structure]

In another embodiment, Z¹ is

[chemical structure]

### R¹⁰

[2421] In another embodiment, R¹⁰ is hydrogen.

[2422] In another embodiment, R¹⁰ is C₁-C₁₀ alkyl. In another embodiment, R¹⁰ is C₃-C₇ alkyl. In another embodiment, R¹⁰ is C₄-C₆ alkyl. In another embodiment, R¹⁰ is C₄. In another embodiment, R¹⁰ is C₅. In another embodiment, R¹⁰ is C₆.

[2423] In another embodiment, R¹⁰ is C₂-C₁₂ alkenyl. In another embodiment, R¹⁰ is C₆-C₁₂ alkenyl. In another embodiment, R¹⁰ is C₂-C₈ alkenyl.

### R¹¹

[2424] In another embodiment, R¹¹ is C₁-C₁₀ alkyl. In another embodiment, R¹¹ is optionally substituted C₁-C₂₀ alkyl. In another embodiment, R¹¹ is optionally substituted branched C₁-C₂₀ alkyl. In another embodiment, R¹¹ is optionally substituted C₁-C₁₅ alkyl. In another embodiment, R¹¹ is optionally substituted C₁-C₁₅ branched alkyl. In another embodiment, R¹¹ is optionally substituted C₁₀-Cis alkyl. In another embodiment, R¹¹ is optionally substituted C₁₀-C₁₅ branched alkyl. In another embodiment, R¹¹ is selected from the group consisting of —CH₃, —CH₂CH₃, and —CH₂CH₂CH₃. In another embodiment, R¹¹ is selected from the group consisting of —CH₂(CH₂)₂CH₃, —CH₂(CH₂)₃CH₃, —CH₂(CH₂)₄CH₃, —CH₂(CH₂)₅CH₃, —CH₂(CH₂)₆CH₃, —CH₂(CH₂)₇CH₃, and —CH₂(CH₂)₈CH₃. In another embodiment, R¹¹ is —CH₃. In another embodiment, R¹¹ is —CH₂CH₃. In another embodiment, R¹¹ is —CH₂CH₂CH₃. In another embodiment, R¹¹ is —CH₂(CH₂)₂CH₃. In another embodiment, R¹¹ is —CH₂(CH₂)₃CH₃. In another embodiment, R¹¹ is —CH₂(CH₂)₄CH₃. In another embodiment, R¹¹ is —CH₂(CH₂)₅CH₃. In another embodiment, R¹¹ is CH₂(CH₂)₆CH₃. In another embodiment, R¹¹ is —CH₂(CH₂)₇CH₃. In another embodiment, R¹¹ is —CH₂(CH₂)₈CH₃.

[2425] In another embodiment, R¹¹ is C₂-C₁₀ alkenyl. In another embodiment, R¹¹ is C₂-C₁₂ alkenyl. In another embodiment, R¹¹ is C₆-C₁₂ alkenyl. In another embodiment, R¹¹ is C₂-C₈ alkenyl.

[2426] In another embodiment, the disclosure provides a compound of any one of Formulae IA, IB, IC, or I-XXI or a pharmaceutically acceptable salt or solvate thereof, wherein R¹¹ is hydrogen.

### Q²

[2427] In another embodiment, Q² is straight chain C₁-C₂₀ alkylenyl. In another embodiment, Q² is straight chain C₁-C₁₀ alkylenyl. In another embodiment, Q² is C₂-C₁₀ alkylenyl. In another embodiment, Q² is selected from the group consisting of —CH₂CH₂—, —CH₂CH₂CH₂—, —CH₂(CH₂)₂CH₂—, —CH₂(CH₂)₃CH₂—, —CH₂(CH₂)₄CH₂—, —CH₂(CH₂)₅CH₂—, —CH₂(CH₂)₆CH₂—, —CH₂(CH₂)₇CH₂—, and —CH₂(CH₂)₈·CH₂—. In another embodiment, Q² is —CH₂CH₂—. In another embodiment, Q² is —CH₂CH₂CH₂—. In another embodiment, Q² is —CH₂(CH₂)₃CH₂—. In another embodiment, Q² is —CH₂(CH₂)₄CH₂—. In another embodiment, Q² is —CH₂(CH₂)₅CH₂—. In another embodiment, Q² is —CH₂(CH₂)₆CH₂—. In another embodiment, Q² is —CH₂(CH₂)₇CH₂—. In another embodiment, Q² is —CH₂(CH₂)₈CH₂—.

### W²

[2428] In another embodiment, W² is selected from the group consisting of —C(═O)O— and —OC(═O)—. In another embodiment, W² is —C(═O)O—. In another embodiment, W² is —OC(═O)—.

### X²

[2429] In another embodiment, X² is optionally substituted C₁-C₁₅ alkylenyl. In another embodiment, X² is C₁-C₁₅ branched alkylenyl. In another embodiment, X² is C₁-C₆ alkylenyl or a bond.

[2430] In another embodiment, X² is C₂-C₄ alkylenyl. In another embodiment, X² is C₃-C₅ alkylenyl. In another embodiment, X² is selected from the group consisting of —CH₂CH₂—, —CH₂CH₂CH₂—, —CH₂(CH₂)₂CH₂—, —CH₂(CH₂)₃CH₂—, and —CH₂(CH₂)₄CH₂—. In another embodiment, X² is —CH₂—. In another embodiment, X² is a bond. In another embodiment, X² is branched C₁-C₁₅ alkylenyl, wherein one or more methylene linkages of X² are optionally and independently replaced with a group selected from —O—, —CH═CH—, —S— and C₃-C₆ cycloalkylenyl.

[2431] In another embodiment, Y² is selected from the group consisting of —(CH₂)ₘ— and —S—. In another embodiment, Y² is —(CH₂)ₘ—. In another embodiment, Y² is —S—.

### Z²

[2432] In another embodiment, Z² is —(CH₂)ₚ—. In another embodiment, Z² is —CH₂—. In another embodiment, Z² is —CH₂CH₂—. In another embodiment, Z² is C₄-C₁₂ cycloalkylenyl. In another embodiment, Z² is a monocyclic C₄-C₈ cycloalkylenyl. In certain embodiments, Z² is optionally substituted.

[2433] In another embodiment, Z² is an optionally substituted bridged bicyclic or multicyclic cycloalkylenyl. In some embodiments, Z² is optionally substituted C₅-C₁₂ bridged cycloalkylenyl. In some embodiments, Z² is optionally substituted C₆-C₁₀ bridged cycloalkylenyl. In some embodiments, Z² is a optionally substituted C₅-C₁₀ bridged cycloalkylenyl. selected from the group consisting of adamantyl, cubanyl, bicyclo[2.2.1]heptyl, bicyclo[2.2.2]octyl, bicyclo[1.1.1]pentyl, bicyclo[3.2.1]octyl, and bicyclo[3.1.1]heptyl.

[2434] In another embodiment, Z² is selected from the group consisting of:

[chemical structure]

[2435] In another embodiment, Z² is

[chemical structure]

[2436] In another embodiment, Z² is

[chemical structure]

[2437] In another embodiment, Z² is

[chemical structure]

[2438] In another embodiment, Z² is selected from the group consisting of:

[chemical structure]

[2439] In another embodiment, Z² is selected from the group consisting of:

[chemical structure]

[2440] In some embodiments, -Q¹-W¹—X¹—Y¹—Z¹—R¹⁰ is selected from the group consisting of:

[chemical structure]

[2441] In some embodiments, Q²-W²—X²—Y²—Z²—R¹¹ is selected from the group consisting of:

[chemical structure]

[chemical structure]

[2442] In some embodiments, —W¹—X¹—Y¹—Z¹—R¹⁰ is selected from the group consisting of:

[chemical structure]

[2443] In some embodiments, —W²—X²—Y²—Z²—R¹¹ is selected from the group consisting of:

[chemical structure]

[chemical structure]

[2444] In another embodiment, the disclosure provides a compound selected from any one of more of the compounds of Table (III), or a pharmaceutically acceptable salt or solvate thereof.

TABLE (III)
Non-Limiting Examples of Ionizable Lipids with a Constrained Arm

| Com- | |
|---|---|
| pound | |
| No. | Structure |
| C1 | [chemical structure] |
| C2 | [chemical structure] |
| C3 | [chemical structure] |
| C4 | [chemical structure] |
| C5 | [chemical structure] |
| C6 | [chemical structure] |
| C7 | [chemical structure] |
| C8 | [chemical structure] |
| C9 | [chemical structure] |
| C10 | [chemical structure] |
| C11 | [chemical structure] |
| C12 | [chemical structure] |
| C13 | [chemical structure] |
| C14 | [chemical structure] |
| C15 | [chemical structure] |
| C16 | [chemical structure] |
| C17 | [chemical structure] |
| C18 | [chemical structure] |
| C19 | [chemical structure] |
| C20 | [chemical structure] |
| C21 | [chemical structure] |
| C22 | [chemical structure] |
| C23 | [chemical structure] |
| C24 | [chemical structure] |
| C25 | [chemical structure] |
| C26 | [chemical structure] |
| C27 | [chemical structure] |
| C28 | [chemical structure] |
| C29 | [chemical structure] |
| C30 | [chemical structure] |
| C31 | [chemical structure] |
| C32 | [chemical structure] |
| C33 | [chemical structure] |
| C34 | [chemical structure] |
| C35 | [chemical structure] |
| C36 | [chemical structure] |
| C37 | [chemical structure] |
| C38 | [chemical structure] |
| C39 | [chemical structure] |
| C40 | [chemical structure] |
| C41 | [chemical structure] |
| C42 | [chemical structure] |
| C43 | [chemical structure] |
| C44 | [chemical structure] |
| C45 | [chemical structure] |
| C46 | [chemical structure] |
| C47 | [chemical structure] |
| C48 | [chemical structure] |
| C49 | [chemical structure] |
| C50 | [chemical structure] |
| C51 | [chemical structure] |
| C52 | [chemical structure] |
| C53 | [chemical structure] |
| C54 | [chemical structure] |
| C55 | [chemical structure] |
| C56 | [chemical structure] |
| C57 | [chemical structure] |
| C58 | [chemical structure] |
| C59 | [chemical structure] |
| C60 | [chemical structure] |
| C61 | [chemical structure] |
| C62 | [chemical structure] |
| C63 | [chemical structure] |
| C64 | [chemical structure] |
| C65 | [chemical structure] |
| C66 | [chemical structure] |
| C67 | [chemical structure] |
| C68 | [chemical structure] |
| C69 | [chemical structure] |
| C70 | [chemical structure] |
| C71 | [chemical structure] |
| C72 | [chemical structure] |
| C73 | [chemical structure] |
| C74 | [chemical structure] |
| C75 | [chemical structure] |
| C76 | [chemical structure] |
| C77 | [chemical structure] |
| C78 | [chemical structure] |
| C79 | [chemical structure] |
| C80 | [chemical structure] |
| C81 | [chemical structure] |

ii. Structural Lipids

[2445] In some embodiments, an LNP comprises a structural lipid. Structural lipids can be selected from the group consisting of, but are not limited to, cholesterol, fecosterol, fucosterol, beta sitosterol, sitosterol, ergosterol, campesterol, stigmasterol, brassicasterol, tomatidine, cholic acid, sitostanol, litocholic acid, tomatine, ursolic acid, alpha-tocopherol, Vitamin D3, Vitamin D2, Calcipotriol, botulin, lupeol, oleanolic acid, beta-sitosterol-acetate and mixtures thereof. In some embodiments, the structural lipid is cholesteryl hemisuccinate (CHEMS). In some embodiments, the structural lipid is 3-(4-((2-(4-morpholinyl)ethyl)amino)-4-oxobutanoate) (Mochol). In some embodiments, the structural lipid is cholesterol. In some embodiments, the structural lipid is a cholesterol analogue disclosed by Patel, et al., Nat Commun., 11, 983 (2020), which is incorporated herein by reference in its entirety. In some embodiments, the structural lipid includes cholesterol and a corticosteroid (such as prednisolone, dexamethasone, prednisone, and hydrocortisone), or any combinations thereof. In some embodiments, a structural lipid is described in international patent application WO2019152557A1, which is incorporated herein by reference in its entirety.

[2446] In some embodiments, a structural lipid is a cholesterol analog. Using a cholesterol analog may enhance endosomal escape as described in Patel et al., Naturally-occurring cholesterol analogues in lipid nanoparticles induce polymorphic shape and enhance intracellular delivery of mRNA, Nature Communications (2020), which is incorporated herein by reference.

[2447] In some embodiments, a structural lipid is a phytosterol. Using a phytosterol may enhance endosomal escape as described in Herrera et al., Illuminating endosomal escape of polymorphic lipid nanoparticles that boost mRNA delivery, Biomaterials Science (2020), which is incorporated herein by reference.

[2448] In some embodiments, a structural lipid contains plant sterol mimetics for enhanced endosomal release.

iii. PEGylated Lipids

[2449] A PEGylated lipid is a lipid modified with polyethylene glycol.

[2450] In some embodiments, an LNP comprises one, two or more PEGylated lipid or PEG-modified lipid. A PEGylated lipid may be selected from the non-limiting group consisting of PEG-modified phosphatidylethanolamines, PEG-modified phosphatidic acids, PEG-modified ceramides, PEG-modified dialkylamines, PEG-modified diacylglycerols, PEG-modified dialkylglycerols, and mixtures thereof. For example, a PEG lipid may be PEG-c-DOMG, PEG-DMG, PEG-DLPE, PEG-DMPE, PEG-DPPC, or a PEG-DSPE lipid.

[2451] In some embodiments, the PEGylated lipid is selected from (R)-2,3-bis(octadecyloxy)propyl-1-(methoxypoly(ethyleneglycol)2000)propylcarbamate, PEG-S-DSG, PEG-S-DMG, PEG-PE, PEG-PAA, PEG-OH DSPE C18, PEG-DSPE, PEG-DSG, PEG-DPG, PEG-DOMG, PEG-DMPE Na, PEG-DMPE, PEG-DMG2000, PEG-DMG C14, PEG-DMG 2000, PEG-DMG, PEG-DMA, PEG-Ceramide C16, PEG-C-DOMG, PEG-c-DMOG, PEG-c-DMA, PEG-cDMA, PEGA, PEG750-C-DMA, PEG400, PEG2k-DMG, PEG2k-C11, PEG2000-PE, PEG2000P, PEG2000-DSPE, PEG2000-DOMG, PEG2000-DMG, PEG2000-C-DMA, PEG2000, PEG200, PEG(2k)-DMG, PEG DSPE C18, PEG DMPE C14, PEG DLPE C12, PEG Click DMG C14, PEG Click C12, PEG Click C10, N(Carbonyl-methoxypolyethylenglycol-2000)-1,2-distearoyl-sn-glycero3-phosphoethanolamine, Myrj52, mPEG-PLA, MPEG-DSPE, mPEG3000-DMPE, MPEG-2000-DSPE, MPEG2000-DSPE, mPEG2000-DPPE, mPEG2000-DMPE, mPEG2000-DMG, mDPPE-PEG2000, 1,2-distearoyl-sn-glycero-3-phosphoethanolamine-PEG2000, HPEG-2K-LIPD, Folate PEG-DSPE, DSPE-PEGMA 500, DSPE-PEGMA, DSPE-PEG6000, DSPE-PEG5000, DSPE-PEG2K-NAG, DSPE-PEG2k, DSPE-PEG2000maleimide, DSPE-PEG2000, DSPE-PEG, DSG-PEGMA, DSG-PEG5000, DPPE-PEG-2K, DPPE-PEG, DPPE-mPEG2000, DPPE-mPEG, DPG-PEGMA, DOPE-PEG2000, DMPE-PEGMA, DMPE-PEG2000, DMPE-Peg, DMPE-mPEG2000, DMG-PEGMA, DMG-PEG2000, DMG-PEG, distearoyl-glycerol-polyethyleneglycol, C18PEG750, CI8PEG5000, CI8PEG3000, CI8PEG2000, CI6PEG2000, CI4PEG2000, C18-PEG5000, C18PEG, C16PEG, C16 mPEG (polyethylene glycol) 2000 Ceramide, C14-PEG-DSPE200, C14-PEG2000, C14PEG2000, C14-PEG 2000, C14-PEG, C14PEG, 14:0-PEG2KPE, 1,2-distearoyl-sn-glycero-3-phosphoethanolamine-PEG2000, (R)-2,3-bis(octadecyloxy)propyl-1-(methoxypoly(ethyleneglycol)2000)propylcarbamate, (PEG)-C-DOMG, PEG-C-DMA, and DSPE-PEG-X.

[2452] In some embodiments, the LNP comprises a PEGylated lipid disclosed in one of US 2019/0240354; US 2010/0130588; US 2021/0087135; WO 2021/204179; US 2021/0128488; US 2020/0121809; US 2017/0119904; US 2013/0108685; US 2013/0195920; US 2015/0005363; US 2014/0308304; US 2013/0053572; WO 2019/232095A1; WO 2021/077067; WO 2019/152557; US 2015/0203446; US 2017/0210697; US 2014/0200257; or WO 2019/089828A1, each of which is incorporated by reference herein in their entirety.

[2453] In some embodiments, the LNP comprises a PEGylated lipid substitute in place of the PEGylated lipid. All embodiments disclosed herein that contemplate a PEGylated lipid should be understood to also apply to PEGylated lipid substitutes. In some embodiments, the LNP comprises a polysarcosine-lipid conjugate, such as those disclosed in US 2022/0001025 A1, which is incorporated by reference herein in its entirety.

v. Phospholipids

[2454] In some embodiments, an LNP of the present disclosure comprises a phospholipid. Phospholipids useful in the compositions and methods may be selected from the non-limiting group consisting of 1,2-distearoyl-sn-glycero-3-phosphocholine (DSPC), 1,2-dioleoyl-sn-glycero-3-phosphoethanolamine (DOPE), 1,2-dilinoleoyl-sn-glycero-3-phosphocholine (DLPC), 1,2-dimyristoyl-sn-glycero-phosphocholine (DMPC), 1,2-dioleoyl-sn-glycero-3-phosphocholine (DOPC), 1,2-dipalmitoyl-sn-glycero-3-phosphocholine (DPPC), 1,2-diundecanoyl-sn-glycero-phosphocholine (DUPC), 1-palmitoyl-2-oleoyl-sn-glycero-3-phosphocho line (POPC), 1,2-di-O-octadecenyl-sn-glycero-3-phosphocholine (18:0 Diether PC), 1-oleoyl-2-cholesterylhemisuc cinoyl-sn-glycero-3-phosphocholine (OChemsPC), 1-hexadecyl-sn-glycero-3-phosphocholine (C16 Lyso PC), 1,2-dilinolenoyl-sn-glycero-3-phosphocholine, 1,2-diarachidonoyl-sn-glycero-3-phosphocholine, 1,2-didocosahexaenoyl-sn-glycero-3-phosphocholine, 1,2-diphytanoylsn-glycero-3-phosphoethanolamine (ME 16.0 PE), 1,2-distearoyl-sn-glycero-3-phosphoethanolamine, 1,2-dilinoleoyl-sn-glycero-3-phosphoethanolamine, 1,2-dilinolenoyl-sn-glycero-3-phosphoethanolamine, 1,2-diarachidonoyl-sn-glycero-3-phosphoethanolamine, 1,2-didocosahexaenoyl-sn-glycero-3-phosphoethanolamine, 1,2-dioleoyl-sn-glycero-3-phospho-rac-(1-glycerol) sodium salt (DOPG), sodium (S)-2-ammonio-3-((((R)-2-(oleoyloxy)-3-(stearoyloxy)propoxy)oxidophosphorypoxy)propanoate (L-α-phosphatidylserine; Brain PS), dimyristoyl phosphatidylcholine (DMPC), dimyristoyl phosphoethanolamine (DMPE), dimyristoylphosphatidylglycerol (DMPG), dioleoyl-phosphatidylethanolamine4-(N-maleimidomethyl)-cyclohexane-1-carboxylate (DOPE-mal), dioleoylphosphatidylglycerol (DOPG), 1,2-dioleoyl-sn-glycero-3-(phospho-L-serine) (DOPS), acell-fusogenicphospholipid (DPhPE), dipalmitoylphosphatidylethanolamine (DPPE), 1,2-Dielaidoyl-sn-phosphatidylethanolamine (DEPE), dipalmitoylphosphatidylglycerol (DPPG), dipalmitoylphosphatidylserine (DPPS), distearoylphosphatidylcholine (DSPC), distearoyl-phosphatidyl-ethanolamine (DSPE), distearoyl phosphoethanolamineimidazole (DSPEI), 1,2-diundecanoyl-sn-glycero-phosphocholine (DUPC), egg phosphatidylcholine (EPC), 1,2-dioleoyl-sn-glycero-3-phosphate (18:1 PA; DOPA), ammonium bis((S)-2-hydroxy-3-(oleoyloxy)propyl) phosphate (18:1 DMP; LBPA), 1,2-dioleoyl-sn-glycero-3-phospho-(1′-myo-inositol) (DOPI; 18:1 PI), 1,2-distearoyl-sn-glycero-3-phospho-L-serine (18:0 PS), 1,2-dilinoleoyl-sn-glycero-3-phospho-L-serine (18:2 PS), 1-palmitoyl-2-oleoyl-sn-glycero-3-phospho-L-serine (16:0-18:1 PS; POPS), 1-stearoyl-2-oleoyl-sn-glycero-3-phospho-L-serine (18:0-18:1 PS), 1-stearoyl-2-linoleoyl-sn-glycero-3-phospho-L-serine (18:0-18:2 PS), 1-oleoyl-2-hydroxy-sn-glycero-3-phospho-L-serine (18:1 Lyso PS), 1-stearoyl-2-hydroxy-sn-glycero-3-phospho-L-serine (18:0 Lyso PS), and sphingomyelin. In some embodiments, an LNP includes DSPC. In certain embodiments, an LNP includes DOPE. In some embodiments, an LNP includes both DSPC and DOPE.

[2455] In some embodiments, an LNP comprises a phospholipid selected from 1-pentadecanoyl-2-oleoyl-sn-glycero-3-phosphocholine, 1-myristoyl-2-palmitoyl-sn-glycero-3-phosphocholine, 1-myristoyl-2-stearoyl-sn-glycero-3-phosphocholine, 1-palmitoyl-2-myristoyl-sn-glycero-3-phosphocholine, 1-palmitoyl-2-stearoyl-sn-glycero-3-phosphocholine, 1-palmitoyl-2-oleoyl-glycero-3-phosphocholine, 1-palmitoyl-2-linoleoyl-sn-glycero-3-phosphocholine, 1-palmitoyl-2-arachidonoyl-sn-glycero-3-phosphocholine, 1-palmitoyl-2-docosahexaenoyl-sn-glycero-3-phosphocholine, 1-stearoyl-2-myristoyl-sn-glycero-3-phosphocholine, 1-stearoyl-2-palmitoyl-sn-glycero-3-phosphocholine, 1-stearoyl-2-oleoyl-sn-glycero-3-phosphocholine, 1-stearoyl-2-linoleoyl-sn-glycero-3-phosphocholine, 1-stearoyl-2-arachidonoyl-sn-glycero-3-phosphocholine, 1-stearoyl-2-docosahexaenoyl-sn-glycero-3-phosphocholine, 1-oleoyl-2-myristoyl-sn-glycero-3-phosphocholine, 1-oleoyl-2-palmitoyl-sn-glycero-3-phosphocholine, 1-oleoyl-2-stearoyl-sn-glycero-3-phosphocholine, 1-palmitoyl-2-acetyl-sn-glycero-3-phosphocholine, 1,2-dioleoyl-sn-glycero-3-phospho-(1′-myo-inositol-3′, 4′-bisphosphate), 1,2-dioleoyl-sn-glycero-3-phospho-(1′-myo-inositol-3′,5′-bisphosphate), 1,2-dioleoyl-sn-glycero-3-phospho-(1′-myo-inositol-4′,5′-bisphosphate), 1,2-dioleoyl-sn-glycero-3-phospho-(1′-myo-inositol-3′,4′,5′-trisphosphate), 1,2-dioleoyl-sn-glycero-3-phospho-(1′-myo-inositol-3′-phosphate), 1,2-dioleoyl-sn-glycero-3-phospho-(1′-myo-inositol-4′-phosphate), 1,2-dioleoyl-sn-glycero-3-phospho-(1′-myo-inositol-5′-phosphate), 1,2-dioleoyl-sn-glycero-3-phospho-(1′-myo-inositol), 1,2-dioleoyl-sn-glycero-3-phospho-L-serine, and 1-(8Z-octadecenoyl)-2-palmitoyl-sn-glycero-3-phosphocholine.

[2456] In some embodiments, a phospholipid tail may be modified in order to promote endosomal escape as described in U.S. Application Publication 2021/0121411, which is incorporated herein by reference.

[2457] In some embodiments, the LNP comprises a phospholipid disclosed in one of US 2019/0240354; US 2010/0130588; US 2021/0087135; WO 2021/204179; US 2021/0128488; US 2020/0121809; US 2017/0119904; US 2013/0108685; US 2013/0195920; US 2015/0005363; US 2014/0308304; US 2013/0053572; WO 20191232095A1; WO 2021/077067; WO 2019/152557; US 2017/0210697; or WO 2019/089828A1, each of which is incorporated by reference herein in their entirety.

[2458] In some embodiments, phospholipids disclosed in US 2020/0121809 have the following structure:

[chemical structure]

wherein R1 and R2 are each independently a branched or straight, saturated or unsaturated carbon chain (e.g., alkyl, alkenyl, alkynyl).
vi. Targeting Moieties

[2459] In some embodiments, the lipid nanoparticle further comprises a targeting moiety. The targeting moiety may be an antibody or a fragment thereof. The targeting moiety may be capable of binding to a target antigen.

[2460] In some embodiments, the pharmaceutical composition comprises a targeting moiety that is operably connected to a lipid nanoparticle. In some embodiments, the targeting moiety is capable of binding to a target antigen. In some embodiments, the target antigen is expressed in a target organ. In some embodiments, the target antigen is expressed more in the target organ than it is in the liver.

[2461] In some embodiments, the targeting moiety is an antibody as described in WO2016189532A1, which is incorporated herein by reference. For example, in some embodiments, the targeted particles are conjugated to a specific anti-CD38 monoclonal antibody (mAb), which allows specific delivery of the siRNAs encapsulated within the particles at a greater percentage to B-cell lymphocytes malignancies (such as MCL) than to other subtypes of leukocytes.

[2462] In some embodiments, the lipid nanoparticles may be targeted when conjugated/attached/associated with a targeting moiety such as an antibody.

vii. Zwitterionic Amino Lipids

[2463] In some embodiments, an LNP comprises a zwitterionic lipid. In some embodiments, an LNP comprising a zwitterionic lipid does not comprise a phospholipid.

[2464] Zwitterionic amino lipids have been shown to be able to self-assemble into LNPs without phospholipids to load, stabilize, and release mRNAs intracellularly as described in U.S. Patent Application 20210121411, which is incorporated herein by reference in its entirety. Zwitterionic, ionizable cationic and permanently cationic helper lipids enable tissue-selective mRNA delivery and CRISPR-Cas9 gene editing in spleen, liver and lungs as described in Liu et al., Membrane-destablizing ionizable phospholipids for organ-selective mRNA delivery and CRISPR-Cas gene editing, Nat Mater. (2021), which is incorporated herein by reference in its entirety.

[2465] The zwitterionic lipids may have head groups containing a cationic amine and an anionic carboxylate as described in Walsh et al., Synthesis, Characterization and Evaluation of Ionizable Lysine-Based Lipids for siRNA Delivery, Bioconjug Chem. (2013), which is incorporated herein by reference in its entirety. Ionizable lysine-based lipids containing a lysine head group linked to a long-chain dialkylamine through an amide linkage at the lysine α-amine may reduce immunogenicity as described in Walsh et al., Synthesis, Characterization and Evaluation of Ionizable Lysine-Based Lipids for siRNA Delivery, Bioconjug Chem. (2013).

viii. Additional Lipid Components

[2466] In some embodiments, the LNP compositions of the present disclosure further comprise one or more additional lipid components capable of influencing the tropism of the LNP. In some embodiments, the LNP further comprises at least one lipid selected from DDAB, EPC, 14PA, 18BMP, DODAP, DOTAP, and C12-200 (see Cheng, et al. Nat Nanotechnol. 2020 April; 15(4): 313-320.; Dillard, et al. PNAS 2021 Vol. 118 No. 52.).

[2467] In some embodiments, the LNP includes at least one cationic lipid. Examples of cationic lipids include, but are not limited to N,N-dioleyl-N,N-dimethylammonium chloride (DODAC), N,N-distearyl-N,N-dimethylammonium bromide (DDAB), N-(1-(2,3-dioleoyloxy) propyl)-N,N,N-trimethylammonium chloride (DOTAP), 1,2-Dioleoyl-3-Dimethylammonium-propane (DODAP), N-(1-(2,3-dioleyloxy)propyl)-N,N,N-trimethylammonium chloride (DOTMA), 1,2-Dioleoylcarbamyl-3-Dimethylammonium-propane (DOCDAP), 1,2-Dilineoyl-3-Dimethylammonium-propane (DLINDAP), dilauryl(C12:0) trimethyl ammonium propane (DLTAP), Dioctadecylamidoglycyl spermine (DOGS), DC-Choi, Dioleoyloxy-N-[2-sperminecarboxamido)ethyl]-N,N-dimethyl-1-propanaminiumtrifluoroacetate (DOSPA), 1,2-Dimyristyloxypropyl-3-dimethyl-hydroxyethyl ammonium bromide (DMRIE), 3-Dimethylamino-2-(Cholest-5-en-3-beta-oxybutan-4-oxy)-1-(cis, cis-9,12-octadecadienoxy)propane (CLinDMA), N,N-dimethyl-2,3-dioleyloxy)propylamine (DODMA), 2-[5′-(cholest-5-en-3 [beta]-oxy)-3′-oxapentoxy)-3-dimethyl-1-(cis,cis-9′,12′-octadecadienoxy) propane (CpLinDMA) and N,N-Dimethyl-3,4-dioleyloxybenzylamine (DMOBA), and 1,2-N,N′-Dioleylcarbamyl-3-dimethylaminopropane (DOcarbDAP).

[2468] In some embodiments, the LNP compositions of the present disclosure comprise, or further comprise one or more lipids selected from 1,2-di-O-octadecenyl-sn-glycero-3-phosphocholine (18:0 Diether PC), 1,2-dilinolenoyl-sn-glycero-3-phosphocholine (18:3 PC), Acylcarnosine (AC), 1-hexadecyl-sn-glycero-3-phosphocholine (C16 Lyso PC), N-oleoyl-sphingomyelin (SPM) (C18:1), N-lignoceryl SPM (C24:0), N-nervonoylshphingomyelin (C24:1), Cardiolipin (CL), 1,2-bis(tricosa-10,12-diynoyl)-sn-glycero-3-phosphocholine (DC8-9PC), dicetyl phosphate (DCP), dihexadecyl phosphate (DCP1), 1,2-Dipalmitoylglycerol-3-hemisuccinate (DGSucc), short-chain bis-n-heptadecanoyl phosphatidylcholine (DHPC), dihexadecoyl-phosphoethanolamine (DHPE), 1,2-dilinoleoyl-sn-glycero-3-phosphocholine (DLPC), 1,2-dilauroyl-sn-glycero-3-PE (DLPE), dimyristoyl glycerol hemisuccinate (DMGS), dimyristoyl phosphatidylcholine (DMPC), dimyristoyl phosphoethanolamine (DMPE), dimyristoylphosphatidylglycerol (DMPG), dioleyloxybenzylalcohol (DOBA), 1,2-dioleoylglyceryl-3-hemisuccinate (DOGHEMS), N-[2-(2-{2-[2-(2,3-Bis-octadec-9-enyloxy-propoxy)-ethoxy]-ethoxyl}-ethoxy)-ethyl]-3-(3,4,5-1rihydroxy-6-hydroxymethyl-1etrahydro-pyran-2-ylsulfanyl)-propionamide (DOGP4αMan), dioleoylphosphatidylcholine (DOPC), dioleoylphosphatidylethanolamine (DOPE), dioleoyl-phosphatidylethanolamine4-(N-maleimidomethyl)-cyclohexane-1-carboxylate (DOPE-mal), dioleoylphosphatidylglycerol (DOPG), 1,2-dioleoyl-sn-glycero-3-(phospho-L-serine) (DOPS), acell-fusogenicphospholipid (DPhPE), dipalmitoylphosphatidylethanolamine (DPPE), dipalmitoylphosphatidylglycerol (DPPG), dipalmitoylphosphatidylserine (DPPS), distearoylphosphatidylcholine (DSPC), distearoyl-phosphatidyl-ethanolamine (DSPE), distearoyl phosphoethanolamineimidazole (DSPEI), 1,2-diundecanoyl-sn-glycero-phosphocholine (DUPC), egg phosphatidylcholine (EPC), histaminedistearoylglycerol (HDSG), 1,2-Dipalmitoylglycerol-hemisuccinate-Na-Histidinyl-Hemisuccinate (HistSuccDG), N-(5′-hydroxy-3′-oxypentyl)-10-12-pentacosadiynamide (h-Pegi-PCDA), 2-[1-hexyloxyethyl]-2-devinylpyropheophorbide-a (HPPH), hydrogenatedsoybeanphosphatidylcholine (HSPC), 1,2-Dipalmitoylglycerol-O-α-histidinyl-Nα-hemisuccinate (IsohistsuccDG), mannosialized dipalmitoylphosphatidylethanolamine (ManDOG), 1,2-Dioleoyl-sn-Glycero-3-Phosphoethanolamine-N44-(p-maleimidomethyl)cyclohexane-carboxamidel (MCC-PE), 1,2-diphytanoyl-sn-glycero-3-phosphoethanolamine (ME 16:0 PE), 1-myristoyl-2-hydroxy-sn-glycero-phosphocholine (MHPC), a thiol-reactive maleimide headgroup lipid e.g. 1,2-dioleoyl-sn-glycero-3-phosphoethanolamine-N-[4-(p-maleimidophenyl)but-yramid (MPB-PE), Nervonic Acid (NA), sodium cholate (NaChol), 1,2-dioleoyl-sn-glycero-3-[phosphoethanolamine-N-dodecanoyl (NC12-DOPE), 1-oleoyl-2-cholesteryl hemisuccinoyl-sn-glycero-3-phosphocholine (OChemsPC), phosphatidylethanolamine lipid (PE), PE lipid conjugated with polyethylene glycol(PEG) (e.g., polyethylene glycol-distearoylphosphatidylethanolamine lipid (PEG-PE)), phosphatidylglycerol (PG), partially hydrogenated soy phosphatidylchloline (PHSPC), phosphatidylinositol lipid (PI), phosphotidylinositol-4-phosphate (PIP), palmitoyloleoylphosphatidylcholine (POPC), phosphatidylethanolamine (POPE), palmitoyloleyolphosphatidylglycerol (POPG), phosphatidylserine (PS), lissamine rhodamineB-phosphatidylethanolamine lipid (Rh-PE), purifiedsoy-derivedmixtureofphospholipids (SIOO), phosphatidylcholine (SM), 18-1-trans-PE,1-stearoyl-2-oleoyl-phosphatidyethanolamine (SOPE), soybean phosphatidylcholine (SPC), sphingomyelins (SPM), alpha,alpha-trehalose-6,6′-dibehenate (TDB), 1,2-dielaidoyl-sn-glycero-3-phophoethanolamine (transDOPE), ((23S,5R)-3-(bis(hexadecyloxy)methoxy)-5-(5-methyl-2,4-dioxo-3,4-dihydropyrimidin-1(2H)-yl)tetrahydrofuran-2-yl)methylmethylphosphate, 1,2-diarachidonoyl-sn-glycero-3-phosphocholine, 1,2-diarachidonoyl-sn-glycero-3-phosphoethanolamine, 1,2-didocosahexaenoyl-sn-glycero-3-phosphocholine, 1,2-didocosahexaenoyl-sn-glycero-3-phosphoethanolamine, 1,2-dilinolenoyl-sn-glycero-3-phosphocholine, 1,2-dilinolenoyl-sn-glycero-3-phosphoethanolamine, 1,2-dilinoleoyl-sn-glycero-3-phosphoethanolamine, 1,2-dioleyl-sn-glycero-3-phosphoethanolamine, 1,2-distearoyl-sn-glycero-3-phosphoethanolamine, 16-O-monomethyl PE, 16-O-dimethyl PE, and dioleylphosphatidylethanolamine.

### G. LNP Payloads

[2469] The Cas12a (or Cas Type V) gene editing systems and/or components thereof may be delivered by way of LNPs as described here. In various embodiments, the Cas12a (or Cas Type V) gene editing systems may be delivered by LNPs into cells, tissues, organs, or organisms. Depending on the chosen format, the Cas12a-based gene editing systems and/or the individual or combined components thereof may be delivered as DNA molecules (e.g., encoded on one or more plasmids), RNA molecules (e.g., guide RNAs for targeting the Cas12a (or Cas Type V) protein or linear or circular mRNAs coding for the Cas12a protein or accessory protein components of the Cas12a-based gene editing systems), proteins (e.g., Cas12a (or Cas Type V) polypeptides, accessory proteins having other functions (e.g., recombinases, nucleases, polymerases, ligases, deaminases, or reverse transcriptases), or protein-nucleic acid complexes (e.g., complexes between a guide RNA and a Cas12a (or Cas Type V) protein or fusion protein comprising a Cas12a protein). These DNA, RNA, protein, or nucleoprotein corresponding to and/or encoding the Cas12a (or Cas Type V) gene editing systems or components thereof comprise the LNP cargo or payloads. In various embodiments, the LNP cargo or payloads may comprise nucleic acid payloads, including coding payloads such as linear and circular mRNA for encoding the various components of the Cas12a (or Cas Type V) editing system.

### A. Nucleic Acid Payloads

[2470] In various embodiments, the LNP compositions described herein can be used to deliver a nucleic acid or polynucleotide payload, e.g., a linear or circular mRNA.

[2471] In some embodiments, an LNP is capable of delivering a polynucleotide to a target cell, tissue, or organ. A polynucleotide, in its broadest sense of the term, includes any compound and/or substance that is or can be incorporated into an oligonucleotide chain. Exemplary polynucleotides for use in accordance with the present disclosure include, but are not limited to, one or more of deoxyribonucleic acid (DNA), ribonucleic acid (RNA) including messenger mRNA (mRNA), hybrids thereof, RNAi-inducing agents, RNAi agents, siRNAs, shRNAs, miRNAs, antisense RNAs, ribozymes, catalytic DNA, RNAs that induce triple helix formation, aptamers, vectors, etc. RNAs useful in the compositions and methods described herein can be selected from the group consisting of but are not limited to, guide RNAs for the Cas12a (or Cas Type V) gene editing systems described herein, prime editor guide RNAs for Cas12a (or Cas Type V) prime editing-based editing systems described herein, ncRNAs for Cas12a (or Cas Type V) retron based editing systems described herein, as well as other types of nucleic acid molecules, such as, shortimers, antagomirs, antisense, ribozymes, short interfering RNA (siRNA), asymmetrical interfering RNA (aiRNA), microRNA (miRNA), Dicer substrate RNA (dsRNA), short hairpin RNA (shRNA), transfer RNA (tRNA), messenger RNA (mRNA), and mixtures thereof. In some embodiments, a polynucleotide is mRNA. In some embodiments, a polynucleotide is circular RNA. In some embodiments, a polynucleotide encodes a protein, e.g., a nucleobase editing enzyme. A polynucleotide may encode any polypeptide of interest, including any naturally or non-naturally occurring or otherwise modified polypeptide. A polypeptide may be of any size and may have any secondary structure or activity. In some embodiments, a polypeptide encoded by an mRNA may have a therapeutic effect when expressed in a cell.

[2472] In other embodiments, a polynucleotide is an siRNA. An siRNA may be capable of selectively knocking down or down regulating expression of a gene of interest. For example, an siRNA could be selected to silence a gene associated with a particular disease, disorder, or condition upon administration to a subject in need thereof of a nanoparticle composition including the siRNA. An siRNA may comprise a sequence that is complementary to an mRNA sequence that encodes a gene or protein of interest. In some embodiments, the siRNA may be an immunomodulatory siRNA.

[2473] In some embodiments, a polynucleotide is an shRNA or a vector or plasmid encoding the same. An shRNA may be produced inside a target cell upon delivery of an appropriate construct to the nucleus. Constructs and mechanisms relating to shRNA are well known in the relevant arts.

[2474] A polynucleotide may include a first region of linked nucleosides encoding a polypeptide of interest (e.g., a coding region), a first flanking region located at the 5′-terminus of the first region (e.g., a 5′-UTR), a second flanking region located at the 3′-terminus of the first region (e.g., a 3′-UTR), at least one 5′-cap region, and a 3′-stabilizing region. In some embodiments, a polynucleotide further includes a poly-A region or a Kozak sequence (e.g., in the 5′-UTR). In some cases, polynucleotides may contain one or more intronic nucleotide sequences capable of being excised from the polynucleotide. In some embodiments, a polynucleotide (e.g., an mRNA) may include a 5′cap structure, a chain terminating nucleotide, a stem loop, a polyA sequence, and/or a polyadenylation signal. Any one of the regions of a nucleic acid may include one or more alternative components (e.g., an alternative nucleoside). For example, the 3′-stabilizing region may contain an alternative nucleoside such as an L-nucleoside, an inverted thymidine, or a 2′-O-methyl nucleoside and/or the coding region, 5′-UTR, 3′-UTR, or cap region may include an alternative nucleoside such as a 5-substituted uridine (e.g., 5-methoxyu ridine), a 1-substituted pseudouridine (e.g., 1-methyl pseudouridine or 1-ethyl-pseudouridine), and/or a 5-substituted cytidine (e.g., 5-methyl-cytidine). In some embodiments, a polynucleotide contains only naturally occurring nucleosides.

[2475] In some cases, a polynucleotide is greater than 30 nucleotides in length. In another embodiment, the poly nucleotide molecule is greater than 35 nucleotides in length. In another embodiment, the length is at least 40 nucleotides. In another embodiment, the length is at least 45 nucleotides. In another embodiment, the length is at least 55 nucleotides. In another embodiment, the length is at least 50 nucleotides. In another embodiment, the length is at least 60 nucleotides. In another embodiment, the length is at least 80 nucleotides. In another embodiment, the length is at least 90 nucleotides. In another embodiment, the length is at least 100 nucleotides. In another embodiment, the length is at least 120 nucleotides. In another embodiment, the length is at least 140 nucleotides. In another embodiment, the length is at least 160 nucleotides. In another embodiment, the length is at least 180 nucleotides. In another embodiment, the length is at least 200 nucleotides. In another embodiment, the length is at least 250 nucleotides. In another embodiment, the length is at least 300 nucleotides. In another embodiment, the length is at least 350 nucleotides. In another embodiment, the length is at least 400 nucleotides. In another embodiment, the length is at least 450 nucleotides. In another embodiment, the length is at least 500 nucleotides. In another embodiment, the length is at least 600 nucleotides. In another embodiment, the length is at least 700 nucleotides. In another embodiment, the length is at least 800 nucleotides. In another embodiment, the length is at least 900 nucleotides. In another embodiment, the length is at least 1000 nucleotides. In another embodiment, the length is at least 1100 nucleotides. In another embodiment, the length is at least 1200 nucleotides. In another embodiment, the length is at least 1300 nucleotides. In another embodiment, the length is at least 1400 nucleotides. In another embodiment, the length is at least 1500 nucleotides. In another embodiment, the length is at least 1600 nucleotides. In another embodiment, the length is at least 1800 nucleotides. In another embodiment, the length is at least 2000 nucleotides. In another embodiment, the length is at least 2500 nucleotides. In another embodiment, the length is at least 3000 nucleotides. In another embodiment, the length is at least 4000 nucleotides. In another embodiment, the length is at least 5000 nucleotides, or greater than 5000 nucleotides.

[2476] In some embodiments, a polynucleotide molecule, formula, composition or method associated therewith comprises one or more polynucleotides comprising features as described in WO2002/098443, WO2003/051401, WO2008/052770, WO2009/127230, WO2006/122828, WO2008/083949, WO2010/088927, WO2010/037539, WO2004/004743, WO2005/016376, WO2006/024518, WO2007/095,976, WO2008/014979, WO2008/077592, WO2009/030481, WO2009/095226, WO2011/069586, WO2011/026641, WO2011/144358, WO2012/019780, WO2012/013326, WO2012/089338, WO2012/113513, WO2012/116811, WO2012/116810, WO2013/113502, WO2013/113501, WO2013/113736, WO2013/143698, WO2013/143699, WO2013/143700, WO2013/120626, WO2013/120627, WO2013/120628, WO2013/120629, WO2013/174409, WO2014/127917, WO2015/024669, WO2015/024668, WO2015/024667, WO2015/024665, WO2015/024666, WO2015/024664, WO2015/101415, WO2015/101414, WO2015/024667, WO2015/062738, WO2015/101416, all of which are incorporated by reference herein.

[2477] In some embodiments, a polynucleotide comprises one or more microRNA binding sites. In some embodiments, a microRNA binding site is recognized by a microRNA in a non-target organ. In some embodiments, a microRNA binding site is recognized by a microRNA in the liver. In some embodiments, a microRNA binding site is recognized by a microRNA in hepatic cells.

B. Linear mRNA Payloads

[2478] In various embodiments, the LNP-based pharmaceutical compositions described herein, e.g., LNP-based gene editing systems, may include one or more linear mRNA molecules or linear mRNA payloads. In various embodiments, the mRNA payloads may encode one or more components of the herein described gene editing systems. For example, an mRNA payload may encode an amino acid sequence-programmable DNA binding domain (e.g., TALENS and zinc finger-binding domains) or a nucleic acid sequence-programmable DNA binding domain (e.g., CRISPR Cas9, CRISPR Cas12a, CRISPR Cas12f, CRISPR Cas13a, CRISPR Cas13b, or TnpB).

[2479] mRNA payloads may also encode, depending upon the nature of the gene editing system, one or more effector domains that provide various functionalities that facilitate changes in nucleotide sequence and/or gene expression, such as, but not limited to, single-strand DNA binding proteins, nucleases, endonucleases, exonucleases, deaminases (e.g., cytidine deaminases or adenosine deaminases), polymerases (e.g., reverse transcriptases), integrases, recombinases, etc., and fusion proteins comprising one or more functional domains linked together.

[2480] Ribonucleic acid (RNA) is a molecule that is made up of nucleotides, which are ribose sugars attached to nitrogenous bases and phosphate groups. The nitrogenous bases include adenine (A), guanine (G), uracil (U), and cytosine (C). Generally, RNA mostly exists in the single-stranded form but can also exists double-stranded in certain circumstances. The length, form and structure of RNA is diverse depending on the purpose of the RNA. For example, the length of an RNA can vary from a short sequence (e.g., siRNA) to a long sequences (e.g., lncRNA), can be linear (e.g., mRNA) or circular (e.g., oRNA), and can either be a coding (e.g., mRNA) or a non-coding (e.g., lncRNA) sequence.

[2481] In various embodiments, the LNP-based gene editing systems, RNA therapeutics and pharmaceutical compositions thereof described herein can be used to deliver a mRNA payload that is a linear mRNA molecule. In embodiments, the mRNA payload may comprise one or more nucleotide sequences that encode a product of interest, such as, but not limited to a component of a gene editing system (e.g., an endonuclease, a prime editor, etc.) and/or a therapeutic protein.

[2482] In some embodiments, the RNA payload may be a linear mRNA. As used herein, the term “messenger RNA” (mRNA) refers to any polynucleotide which encodes a protein of interest and which is capable of being translated to produce the encoded protein of interest in vitro, in vivo, in situ or ex vivo.

[2483] Generally, a mRNA molecule comprises at least a coding region, a 5′ untranslated region (UTR), a 3′ UTR, a 5′ cap and a poly-A tail. In some aspects, one or more structural and/or chemical modifications or alterations may be included in the RNA which can reduce the innate immune response of a cell in which the mRNA is introduced. As used herein, a “structural” feature or modification is one in which two or more linked nucleotides are inserted, deleted, duplicated, inverted or randomized in a nucleic acid without significant chemical modification to the nucleotides themselves. Because chemical bonds will necessarily be broken and reformed to affect a structural modification, structural modifications are of a chemical nature and hence are chemical modifications. However, structural modifications will result in a different sequence of nucleotides. For example, the polynucleotide “ATCG” may be chemically modified to “AT-SmeC-G”.

[2484] Generally, a coding region of interest in an mRNA used herein may encode a dipeptide, a tripeptide, a tetrapeptide, a pentapeptide, a hexapeptide, a heptapeptide, an octapeptide, a nonapeptide, or a decapeptide. In another embodiment, the mRNA may encode a peptide of 2-30 amino acids, e.g. 5-30, 2-25, 5-25, 10-25, or 10-20 amino acids. The mRNA may encode a peptide of at least 10, 11, 12, 13, 14, 15, 17, 20, 25, 26, 27, 28, 29, 30, 31, 32, 33, 34, 35, 36, 37, 38, 39, or 40 amino acids, or a peptide that is no longer than 10, 11, 12, 13, 14, 15, 17, 20, 25, 26, 27, 28, 29, 30, 31, 32, 33, 34, 35, 36, 37, 38, 39, or 40 amino acids.

[2485] Generally, the length of the region of the mRNA encoding a product of interest is greater than about 30 nucleotides in length (e.g., at least or greater than about 35, 40, 45, 50, 55, 60, 70, 80, 90, 100, 120, 140, 160, 180, 200, 250, 300, 350, 400, 450, 500, 600, 700, 800, 900, 1000, 1,100, 1,200, 1,300, 1,400, 1,500, 1,600, 1,700, 1,800, 1,900, 2,000, 2,500, and 3,000, 4,000, 5,000, 6,000, 7,000, 8,000, 9,000, 10,000, 20,000, 30,000, 40,000, 50,000, 60,000, 70,000, 80,000, 90,000 or up to and including 100,000 nucleotides).

[2486] In some embodiments, the mRNA has a total length that spans from about 30 to about 100,000 nucleotides (e.g., from 30 to 50, from 30 to 100, from 30 to 250, from 30 to 500, from 30 to 1,000, from 30 to 1,500, from 30 to 3,000, from 30 to 5,000, from 30 to 7,000, from 30 to 10,000, from 30 to 25,000, from 30 to 50,000, from 30 to 70,000, from 100 to 250, from 100 to 500, from 100 to 1,000, from 100 to 1,500, from 100 to 3,000, from 100 to 5,000, from 100 to 7,000, from 100 to 10,000, from 100 to 25,000, from 100 to 50,000, from 100 to 70,000, from 100 to 100,000, from 500 to 1,000, from 500 to 1,500, from 500 to 2,000, from 500 to 3,000, from 500 to 5,000, from 500 to 7,000, from 500 to from 500 to 25,000, from 500 to 50,000, from 500 to 70,000, from 500 to 100,000, from 1,000 to 1,500, from 1,000 to 2,000, from 1,000 to 3,000, from 1,000 to 5,000, from 1,000 to 7,000, from 1,000 to 10,000 from 1,000 to 25,000, from 1,000 to 50,000, from 1,000 to 70,000, from 1,000 to 100,000, from 1,500 to 3,000, from 1,500 to 5,000, from 1,500 to 7,000, from 1,500 to 10,000, from 1,500 to 25,000, from 1,500 to 50,000, from 1,500 to 70,000, from 1,500 to 100,000, from 2,000 to 3,000, from 2,000 to 5,000 from 2,000 to 7,000, from 2,000 to 10,000, from 2,000 to 25,000, from 2,000 to 50,000, from 2,000 to 70,000, and from 2,000 to 100,000 nucleotides).

[2487] In some embodiments, the region or regions flanking the region encoding the product of interest may range independently from 15-1,000 nucleotides in length (e.g., greater than 30, 40, 45, 50, 60, 70, 80, 90, 100, 120, 140, 160, 180, 200, 250, 300, 350, 400, 450, 500, 600, 700, 800, and 900 nucleotides or at least 30, 40, 45, 50, 55, 60, 70, 80, 90, 100, 120, 140, 160, 180, 200, 250, 300, 350, 400, 450, 500, 600, 700, 800, 900, and 1,000 nucleotides).

[2488] In some embodiments, the mRNA comprises a tailing sequence which can range from absent to 500 nucleotides in length (e.g., at least 60, 70, 80, 90, 120, 140, 160, 180, 200, 250, 300, 350, 400, 450, or 500 nucleotides). Where the tailing region is a polyA tail, the length may be determined in units of or as a function of polyA Binding Protein binding. In this embodiment, the polyA tail is long enough to bind at least 4 monomers of PolyA Binding Protein. PolyA Binding Protein monomers bind to stretches of approximately 38 nucleotides. As such, it has been observed that polyA tails of about 80 nucleotides and 160 nucleotides are functional.

[2489] In some embodiments, the mRNA comprises a capping sequence which comprises a single cap or a series of nucleotides forming the cap. The capping sequence may be from 1 to 10, e.g. 2-9, 3-8, 4-7, 1-5, 5-10, or at least 2, or 10 or fewer nucleotides in length. In some embodiments, the caping sequence is absent.

[2490] In some embodiments, the mRNA comprises a region comprising a start codon. The region comprising the start codon may range from 3 to 40, e.g., 5-30, 10-20, 15, or at least 4, or 30 or fewer nucleotides in length.

[2491] In some embodiments, the mRNA comprises a region comprising a stop codon. The region comprising the stop codon may range from 3 to 40, e.g., 5-30, 10-20, 15, or at least 4, or 30 or fewer nucleotides in length.

[2492] In some embodiments, the mRNA comprises a region comprising a restriction sequence.

[2493] The region comprising the restriction sequence may range from 3 to 40, e.g., 5-30, 10-20, 15, or at least 4, or 30 or fewer nucleotides in length.

### Untranslated Regions (UTRs)

[2494] In various embodiments, the mRNA payloads of the LNP-based nucleobase editing systems, RNA therapeutics and pharmaceutical compositions thereof described herein, may comprise at least one untranslated region (UTR) which flanks the region encoding the product of interest and/or is incorporated within the mRNA molecule. UTRs are transcribed by not translated. The mRNA payloads can include 5′ UTR sequences and 3′ UTR sequences, as well as internal UTRs.

[2495] The RNA payloads of the present disclosure may comprise one or more regions or parts which act or function as an untranslated region. Where nucleic acids are designed to encode at least one polypeptide of interest, the nucleic acid may comprise one or more of these untranslated regions (UTRs). Wild-type untranslated regions of a nucleic acid are transcribed but not translated. In mRNA, the 5′ UTR starts at the transcription start site and continues to the start codon but does not include the start codon; whereas, the 3′ UTR starts immediately following the stop codon and continues until the transcriptional termination signal. There is growing body of evidence about the regulatory roles played by the UTRs in terms of stability of the nucleic acid molecule and translation. The regulatory features of a UTR can be incorporated into the RNA payload molecules (e.g., linear and circular mRNA molecules) of the present disclosure to, among other things, enhance the stability of the molecule. The specific features can also be incorporated to ensure controlled down-regulation of the transcript in case they are misdirected to undesired organs sites. A variety of 5′UTR and 3′UTR sequences are known and available in the art.

[2496] In various embodiments, the mRNA payloads of the LNP-based nucleobase editing systems, RNA therapeutics and pharmaceutical compositions thereof described herein, may comprise at least one UTR that may be selected from any UTR sequence listed in Tables 19 or 20 of U.S. Pat. No. 10,709,779 which is incorporated herein by reference.

5′ UTR regions

[2497] In various embodiments, the mRNA payloads of the LNP-based gene editing systems, RNA therapeutics and pharmaceutical compositions thereof described herein, may comprise at least one 5′ UTR.

[2498] A 5′ UTR is region of an mRNA that is directly upstream (5′) from the start codon (the first codon of an mRNA transcript translated by a ribosome). A 5′ UTR does not encode a protein (is non-coding). Natural 5′UTRs have features that play roles in translation initiation. They harbor signatures like Kozak sequences which are commonly known to be involved in the process by which the ribosome initiates translation of many genes. Kozak sequences have the consensus CCR(A/G)CCAUGG (SEQ ID NO:681), where R is a purine (adenine or guanine) three bases upstream of the start codon (AUG), which is followed by another ‘G’. 5′UTR also have been known to form secondary structures which are involved in elongation factor binding. 5′ UTR sequences are also known to be important for ribosome recruitment to the mRNA and have been reported to play a role in translation (Hinnebusch A, et al., (2016) Science, 352:6292: 1413-6). In addition, 5′ UTR sequences may confer increased half-life, increased expression and/or increased activity of a polypeptide encoded by the RNA payload described herein.

[2499] In various embodiments, the RNA payload constructs contemplated herein may include 5′UTRs that are found in nature and those that are not. For example, the 5′UTRs can be synthetic and/or can be altered in sequence with respect to a naturally occurring 5′UTR. Such altered 5′UTRs can include one or more modifications relative to a naturally occurring 5′UTR, such as, for example, an insertion, deletion, or an altered sequence, or the substitution of one or more nucleotide analogs in place of a naturally occurring nucleotide.

[2500] The 5′ UTR starts at the transcription start site and continues to the start codon but does not include the start codon; whereas, the 3′UTR starts immediately following the stop codon and continues until the transcriptional termination signal. While not wishing to be bound by theory, the UTRs may have a regulatory role in terms of translation and stability of the nucleic acid.

[2501] Natural 5′ UTRs usually include features which have a role in translation initiation as they tend to include Kozak sequences which are commonly known to be involved in the process by which the ribosome initiates translation of many genes. Kozak sequences have the consensus CCR(A/G)CCAUGG, where R is a purine (adenine or guanine) three bases upstream of the start codon (AUG), which is followed by another ‘G’. 5′UTR also have been known to form secondary structures which are involved in elongation factor binding.

[2502] In an embodiment, the 5′ UTR comprises a sequence provided in Table X or a sequence having at least 80%, 85%, 90%, 95%, 96%, 97%, 98%, 99% or 100% sequence identity to a 5′ UTR sequence provided in Table X, or a variant or a fragment thereof (e.g., a fragment that lacks the first one, two, three, four, five, or six nucleotides of the 5′ UTR sequence provided in Table X). In an embodiment, the 5′ UTR comprises a sequence with at least 80%, 85%, 90%, 95%, 96%, 97%, 98%, 99% or 100% identity to SEQ ID NO:682, SEQ ID NO:683, SEQ ID NO:684, SEQ ID NO:685, SEQ ID NO:686, SEQ ID NO:687, SEQ ID NO:688, SEQ ID NO:689, SEQ ID NO:690, SEQ ID NO:691, SEQ ID NO:692, SEQ ID NO:693, SEQ ID NO:694, SEQ ID NO:695, SEQ ID NO:696, SEQ ID NO:697, SEQ ID NO:798, SEQ ID NO:699, SEQ ID NO:700, SEQ ID NO:701, SEQ ID NO:702, SEQ ID NO:703, SEQ ID NO:704, SEQ ID NO:705, SEQ ID NO:706, SEQ ID NO:707, SEQ ID NO:708, SEQ ID NO:709, or SEQ ID NO:710.

TABLE X
Exemplary nucleotide sequences of 5′ UTRs

| | Sequence |
|---|---|
| 5′ UTR Nucleotide Sequence | Identifier |
| ggaaaucgca aaauuugcuc uucgcguuag auuucuuuua guuuucucgc aacuagcaag | SEQ ID NO: 682 |
| cuuuuuguuc ucgccgccgc c | |
| ggaaaucgca aaauuugcuc uucgcguuag auuucuuuua guuuucucgc aacuagcaag | SEQ ID NO: 683 |
| ggaaaucgca aaauuuucuu uucgcguuag auuucuuuua guuuucuuuc aacuagcaag | SEQ ID NO: 684 |
| cuuuuuguuc ucgccgccgc c | |
| ggaaaucgca aaauuuuugc ucuuuuucgc guuagauuuc uuuuaguuuu cuykcaacua | SEQ ID NO: 685 |
| gcaagcuuuu uguucucgcc rcc | |
| ggaaaucccc acaaccgccu cauauccagg cucaagaaua gagcucagug uuuuguuguu | SEQ ID NO: 686 |
| uaaucauucc gacguguuuu gcgauauucg cgcaaagcag ccagucgcgc gcuugcuuuu | |
| aaguagaguu guuuuuccac ccguuugcca ggcaucuuua auuuaacaua uuuuuauuuu | |
| ucaggcuaac cuacgccgcc acc | |
| ggaaauaaga gagaaaagaa gaguaagaag aaauauaaga ucucccugag cuucagggag | SEQ ID NO: 687 |
| ccccggcgcc gccacc | |
| ggaaaccccc cacccccgua agagagaaaa gaagaguaag aagaaauaua agaucucccu | SEQ ID NO: 688 |
| gagcuucagg gagccccggc gccgccacc | |
| ggagaacuuc cgcuuccguu ggcgcaagcg cuuucauuuu uucugcuacc gugacuaag | SEQ ID NO: 689 |
| ggaaauaaga gagaaaagaa gaguaagaag aaauauaaga gccacc | SEQ ID NO: 690 |
| ggaaauaaga gagaaaagaa gaguaagaag aaauauaaga ccccggcgcc gccacc | SEQ ID NO: 691 |
| ggaaacuuua uuuaguguua cuuuauuuuc uguuuauuug uguuucuuca guggguuugu | SEQ ID NO: 692 |
| ucuaauuucc uuggccgcc | |
| ggaaaaucug uauuagguug gcguguucuu uggucgguug uuaguauugu uguugauucg | SEQ ID NO: 693 |
| uuuguggucg guugccgcc | |
| ggaaaauuau uaacaucuug guauucucga uaaccauucg uuggauuuua uuguauucgu | SEQ ID NO: 694 |
| aguuuggguu ccugccgcc | |
| ggaaauuauu auuauuucua gcuacaauuu aucauuguau uauuuuagcu auucaucauu | SEQ ID NO: 695 |
| auuuacuugg ugaucaaca | |
| ggaaauaggu uguuaaccaa guucaagccu aauaagcuug gauucuggug acuugcuuca | SEQ ID NO: 696 |
| ccguuggcgg gcaccgauc | |
| ggaaaucgua gagagucgua cuuaguacau aucgacuauc gguggacacc aucaagauua | SEQ ID NO: 697 |
| uaaaccaggc caga | |
| ggaaacccgc ccaagcgacc ccaacauauc agcaguugcc caaucccaac ucccaacaca | SEQ ID NO: 698 |
| auccccaagc aacgccgcc | |
| ggaaagcgau ugaaggcguc uuuucaacua cucgauuaag guuggguauc gucgugggac | SEQ ID NO: 699 |
| uuggaaauuu guuguuucc | |
| ggaaacuaau cgaaauaaaa gagccccgua cucuuuuauu ucuauuaggu uaggagccuu | SEQ ID NO: 700 |
| agcauuugua ucuuaggua | |
| ggaaauguga uuuccagcaa cuucuuuuga auauauugaa uuccuaauuc aaagcgaaca | SEQ ID NO: 701 |
| aaucuacaag ccauauacc | |
| ggaaaucgua gagagucgua cuuacguggu cgccauugca uagcgcgcga aagcaacagg | SEQ ID NO: 702 |
| aacaagaacg cgcc | |
| ggaaaucgua gagagucgua cuuagaauaa acagagucgg gucgacuugu cucugauacu | SEQ ID NO: 703 |
| acgacgucac aauc | |
| ggaaaauuug ccuucggagu ugcguauccu gaacugccca gccuccugau auacaacugu | SEQ ID NO: 704 |
| uccgcuuauu cgggccgcc | |
| ggaaaucuga gcaggaaucc uuugugcauu gaagacuuua gauuccucuc ugcgguagac | SEQ ID NO: 705 |
| gugcacuuau aaguauuug | |
| ggaaagcgau ugaaggcguc uuuucaacua cucgauuaag guuggguauc gucgugggac | SEQ ID NO: 706 |
| uuggaaauuu guugccacc | |
| ggaaaauuuu agccuggaac guuagauaac uguccuguug ucuuuauaua cuuggucccc | SEQ ID NO: 707 |
| aaguaguuug ucuuccaaa | |
| ggaaauuuuu uuuugauauu auaagaguuu uuuuuugaua uuaagaaaau uuuuuuuuga | SEQ ID NO: 708 |
| uauuagaaga guaagaagaa auauaagacc ccggcgccgc cacc | |
| ggaaauaaga gagaaaagaa gaguaagaag aaauauaaga gccaaaaaaa aaaaacc | SEQ ID NO: 709 |
| ggaaaucucc cugagcuuca gggaguaaga gagaaaagaa gaguaagaag aaauauaaga | SEQ ID NO: 710 |
| ccccggcgcc gccacc | |

[2503] In some embodiments of the disclosure, a 5′ UTR is a heterologous UTR, i.e., is a UTR found in nature associated with a different mRNA. In another embodiment, a 5′ UTR is a synthetic UTR, i.e., does not occur in nature. Synthetic UTRs include UTRs that have been mutated to improve their properties, e.g., which increase gene expression as well as those which are completely synthetic. Exemplary 5′ UTRs include Xenopus or human derived alpha-globin or beta-globin (e.g., U.S. Pat. Nos. 8,278,063 and 9,012,219), human cytochrome b-245 polypeptide, and hydroxysteroid (17b) dehydrogenase, and Tobacco etch virus. CMV immediate-early 1 (IE1) gene (see US20140206753 and WO2013/185069), the sequence GGGAUCCUACC (SEQ ID NO: 21) (WO2014144196) may also be used. In another embodiment, 5′ UTR of a TOP gene is a 5′ UTR of a TOP gene lacking the 5′ TOP motif (the oligopyrimidine tract) (e.g., WO/2015101414, WO2015101415, WO/2015/062738, WO2015024667, WO2015024667; 5′ UTR element derived from ribosomal protein Large 32 (L32) gene (WO/2015101414, WO2015101415, WO/2015/062738)), 5′ UTR element derived from the 5′UTR of an hydroxysteroid (17-13) dehydrogenase 4 gene (HSD17B4) (WO2015024667), or a 5′ UTR element derived from the 5′ UTR of ATP5A1 (WO2015024667) can be used. In one embodiment, an internal ribosome entry site (IRES) is used as a substitute for a 5′ UTR.

[2504] In some embodiments, a 5′ UTR of the present disclosure comprises a sequence selected from SEQ ID NO:711 (GGGAAAUAAG AGAGAAAAGA AGAGUAAGAA GAAAUAUAAG AGCCACC), and SEQ ID NO:712 (GGGAAATAAG AGAGAAAAGA AGAGTAAGAA GAAATATAAG AGCCACC).

### 3′ UTR Regions

[2505] In various embodiments, the mRNA payloads of the LNP-based base editing systems, RNA therapeutics and pharmaceutical compositions thereof described herein, may comprise at least one 3′ UTR. 3′ UTRs may be heterologous or synthetic.

[2506] A 3′ UTR is region of an mRNA that is directly downstream (3′) from the stop codon (the codon of an mRNA transcript that signals a termination of translation). A 3′ UTR does not encode a protein (is non-coding). Natural or wild type 3′ UTRs are known to have stretches of adenosines and uridines embedded in them. These AU rich signatures are particularly prevalent in genes with high rates of turnover. Based on their sequence features and functional properties, the AU rich elements (AREs) can be separated into three classes (Chen et al, 1995): Class I AREs contain several dispersed copies of an AUUUA motif within U-rich regions. C-Myc and MyoD contain class I AREs. Class II AREs possess two or more overlapping UUAUUUA(U/A)(U/A) nonamers. Molecules containing this type of AREs include GM-CSF and TNF-α. Class III ARES are less well defined. These U rich regions do not contain an AUUUA motif c-Jun and Myogenin are two well-studied examples of this class. Most proteins binding to the AREs are known to destabilize the messenger, whereas members of the ELAV family, most notably HuR, have been documented to increase the stability of mRNA. HuR binds to AREs of all the three classes. Engineering the HuR specific binding sites into the 3′ UTR of nucleic acid molecules will lead to HuR binding and thus, stabilization of the message in vivo.

[2507] 3′ UTRs are known to have stretches of adenosines and uridines embedded in them. These AU rich signatures are particularly prevalent in genes with high rates of turnover. Based on their sequence features and functional properties, the AU rich elements (AREs) can be separated into three classes (Chen et al., 1995): Class I AREs contain several dispersed copies of an AUUUA motif within U-rich regions. C-Myc and MyoD contain class I AREs. Class II AREs possess two or more overlapping UUAUUUA(U/A)(U/A) nonamers. Molecules containing this type of AREs include GM-CSF and TNF-α. Class III ARES are less well defined. These U rich regions do not contain an AUUUA motif c-Jun and Myogenin are two well-studied examples of this class. Most proteins binding to the AREs are known to destabilize the messenger, whereas members of the ELAV family, most notably HuR, have been documented to increase the stability of mRNA. HuR binds to AREs of all the three classes. Engineering the HuR specific binding sites into the 3′ UTR of nucleic acid molecules will lead to HuR binding and thus, stabilization of the message in vivo.

[2508] Introduction, removal or modification of 3′ UTR AU rich elements (AREs) can be used to modulate the stability of the mRNA payloads described herein. For example, one or more copies of an ARE can be introduced to make mRNA less stable and thereby curtail translation and decrease production of the resultant protein. Alternatively, AREs can be identified and removed or mutated to increase the intracellular stability and thus increase translation and production of the resultant protein.

[2509] In some embodiments, the introduction of features often expressed in genes of target organs the stability and protein production of the mRNA can be enhanced in a specific organ and/or tissue. As a non-limiting example, the feature can be a UTR. As another example, the feature can be introns or portions of introns sequences.

[2510] Those of ordinary skill in the art will understand that 5′ UTRs that are heterologous or synthetic may be used with any desired 3′ UTR sequence. For example, a heterologous 5′ UTR may be used with a synthetic 3′ UTR with a heterologous 3′ UTR.

[2511] Non-UTR sequences may also be used as regions or subregions within an RNA payload construct. For example, introns or portions of introns sequences may be incorporated into regions of nucleic acid of the disclosure. Incorporation of intronic sequences may increase protein production as well as nucleic acid levels.

[2512] Combinations of features may be included in flanking regions and may be contained within other features. For example, the polypeptide coding region of interest in an mRNA payload may be flanked by a 5′ UTR which may contain a strong Kozak translational initiation signal and/or a 3′ UTR which may include an oligo(dT) sequence for templated addition of a poly-A tail. 5′ UTR may comprise a first polynucleotide fragment and a second polynucleotide fragment from the same and/or different genes such as the 5′ UTRs described in US Patent Application Publication No. 20100293625 and PCT/US2014/069155, herein incorporated by reference in its entirety

[2513] It should be understood that any UTR from any gene may be incorporated into the regions of an RNA payload molecule (e.g., a linear mRNA). Furthermore, multiple wild-type UTRs of any known gene may be utilized. It is also within the scope of the present disclosure to provide artificial UTRs which are not variants of wild type regions. These UTRs or portions thereof may be placed in the same orientation as in the transcript from which they were selected or may be altered in orientation or location. Hence a 5′ or 3′ UTR may be inverted, shortened, lengthened, made with one or more other 5′ UTRs or 3′ UTRs. As used herein, the term “altered” as it relates to a UTR sequence, means that the UTR has been changed in some way in relation to a reference sequence. For example, a 3′ UTR or 5′ UTR may be altered relative to a wild-type or native UTR by the change in orientation or location as taught above or may be altered by the inclusion of additional nucleotides, deletion of nucleotides, swapping or transposition of nucleotides. Any of these changes producing an “altered” UTR (whether 3′ or 5′) comprise a variant UTR.

[2514] In some embodiments, a double, triple or quadruple UTR such as a 5′ UTR or 3′ UTR may be used. As used herein, a “double” UTR is one in which two copies of the same UTR are encoded either in series or substantially in series. For example, a double beta-globin 3′ UTR may be used as described in US Patent publication 20100129877, the contents of which are incorporated herein by reference in its entirety.

[2515] It is also within the scope of the present disclosure to have patterned UTRs. As used herein “patterned UTRs” are those UTRs which reflect a repeating or alternating pattern, such as ABABAB or AABBAABBAABB or ABCABCABC or variants thereof repeated once, twice, or more than 3 times. In these patterns, each letter, A, B, or C represent a different UTR at the nucleotide level.

[2516] In some embodiments, flanking regions are selected from a family of transcripts whose proteins share a common function, structure, feature or property. For example, polypeptides of interest may belong to a family of proteins which are expressed in a particular cell, tissue or at some time during development. The UTRs from any of these genes may be swapped for any other UTR of the same or different family of proteins to create a new polynucleotide. As used herein, a “family of proteins” is used in the broadest sense to refer to a group of two or more polypeptides of interest which share at least one function, structure, feature, localization, origin, or expression pattern.

[2517] The untranslated region may also include translation enhancer elements (TEE). As a non-limiting example, the TEE may include those described in US Application No. 20090226470, herein incorporated by reference in its entirety, and those known in the art.

### 5′ Capping

[2518] In various embodiments, the mRNA payloads of the LNP-based base editing systems, RNA therapeutics and pharmaceutical compositions thereof described herein, may comprise a 5′ cap structure.

[2519] The 5′ cap structure of an mRNA is involved in nuclear export, increasing mRNA stability and binds the mRNA Cap Binding Protein (CBP), which is responsible for mRNA stability in the cell and translation competency through the association of CBP with poly(A) binding protein to form the mature cyclic mRNA species. The cap further assists the removal of 5′ proximal introns removal during mRNA splicing.

[2520] Endogenous mRNA molecules may be 5′-end capped generating a 5′-ppp-5′-triphosphate linkage between a terminal guanosine cap residue and the 5′-terminal transcribed sense nucleotide of the mRNA molecule. This 5′-guanylate cap may then be methylated to generate an N7-methyl-guanylate residue. The ribose sugars of the terminal and/or anteterminal transcribed nucleotides of the 5′ end of the mRNA may optionally also be 2′-0-methylated. 5′-decapping through hydrolysis and cleavage of the guanylate cap structure may target a nucleic acid molecule, such as an mRNA molecule, for degradation.

[2521] Modifications to mRNA may generate a non-hydrolyzable cap structure preventing decapping and thus increasing mRNA half-life. Because cap structure hydrolysis requires cleavage of 5′-ppp-5′ phosphorodiester linkages, modified nucleotides may be used during the capping reaction. For example, a Vaccinia Capping Enzyme from New England Biolabs (Ipswich, MA) may be used with a-thio-guanosine nucleotides according to the manufacturer's instructions to create a phosphorothioate linkage in the 5′-ppp-5′ cap.

[2522] Additional modified guanosine nucleotides may be used such as α-methyl-phosphonate and seleno-phosphate nucleotides.

[2523] Additional modifications include, but are not limited to, 2′-0-methylation of the ribose sugars of 5′-terminal and/or 5′-anteterminal nucleotides of the mRNA (as mentioned above) on the 2′-hydroxyl group of the sugar ring. Multiple distinct 5′-cap structures can be used to generate the 5′-cap of a nucleic acid molecule, such as an mRNA molecule.

[2524] Cap analogs, which herein are also referred to as synthetic cap analogs, chemical caps, chemical cap analogs, or structural or functional cap analogs, differ from natural (i.e. endogenous, wild-type or physiological) 5′-caps in their chemical structure, while retaining cap function. Cap analogs may be chemically (i.e. non-enzymatically) or enzymatically synthesized and/or linked to a nucleic acid molecule.

[2525] For example, the Anti-Reverse Cap Analog (ARCA) cap contains two guanines linked by a 5′-5′-triphosphate group, wherein one guanine contains an N7 methyl group as well as a 3′-0-methyl group (i.e., N7,3′-0-dimethyl-guanosine-5′-triphosphate-5′-guanosine (m⁷G-3′mppp-G; which may equivalently be designated 3′ O-Me-m7G(5′)ppp(5′)G). The 3′-0 atom of the other, unmodified, guanine becomes linked to the 5′-terminal nucleotide of the capped nucleic acid molecule (e.g. an mRNA). The N7- and 3′-O-methylated guanine provides the terminal moiety of the capped nucleic acid molecule (e.g. mRNA).

[2526] Another exemplary cap is mCAP, which is similar to ARCA but has a 2′-0-methyl group on guanosine (i.e., N7,2′-0-dimethyl-guanosine-5′-triphosphate-5′-guanosine, m⁷ Gm-ppp-G).

[2527] While cap analogs allow for the concomitant capping of a nucleic acid molecule in an in vitro transcription reaction, up to 20% of transcripts can remain uncapped. This, as well as the structural differences of a cap analog from an endogenous 5′-cap structures of nucleic acids produced by the endogenous, cellular transcription machinery, may lead to reduced translational competency and reduced cellular stability.

[2528] mRNA may also be capped post-transcriptionally, using enzymes, in order to generate more authentic 5′-cap structures. As used herein, the phrase “more authentic” refers to a feature that closely mirrors or mimics, either structurally or functionally, an endogenous or wild type feature. That is, a “more authentic” feature is better representative of an endogenous, wild-type, natural or physiological cellular function and/or structure as compared to synthetic features or analogs, etc., of the prior art, or which outperforms the corresponding endogenous, wild-type, natural or physiological feature in one or more respects. Non-limiting examples of more authentic 5′cap structures are those which, among other things, have enhanced binding of cap binding proteins, increased half-life, reduced susceptibility to 5′ endonucleases and/or reduced 5′decapping, as compared to synthetic 5′cap structures known in the art (or to a wild-type, natural or physiological 5′cap structure). For example, recombinant Vaccinia Virus Capping Enzyme and recombinant 2′-O-methyltransferase enzyme can create a canonical 5′-5′-triphosphate linkage between the 5′-terminal nucleotide of an mRNA and a guanine cap nucleotide wherein the cap guanine contains an N7 methylation and the 5′-terminal nucleotide of the mRNA contains a 2′-0-methyl. Such a structure is termed the Capl structure. This cap results in a higher translational-competency and cellular stability and a reduced activation of cellular pro-inflammatory cytokines, as compared, e.g., to other 5′cap analog structures known in the art. Cap structures include, but are not limited to, 7mG(5*)ppp(5*)N,pN2p (cap 0), 7mG(5*)ppp(5*)NlmpNp (cap 1), and 7mG(5*)-ppp(5′)NlmpN2mp (cap 2).

[2529] In some embodiments, the 5′ terminal caps may include endogenous caps or cap analogs.

[2530] In some embodiments, a 5′ terminal cap may comprise a guanine analog. Useful guanine analogs include, but are not limited to, inosine, Nl-methyl-guanosine, 2′fluoro-guanosine, 7-deaza-guanosine, 8-oxo-guanosine, 2-amino-guanosine, LNA-guanosine, and 2-azido-guanosine.

### IRES Sequences

[2531] In various embodiments, the mRNA payloads of the LNP-based gene editing systems, RNA therapeutics and pharmaceutical compositions thereof described herein, may comprise one or more IRES sequences.

[2532] In some embodiments, the mRNA may contain an internal ribosome entry site (IRES). First identified as a feature Picorna virus RNA, IRES plays an important role in initiating protein synthesis in absence of the 5′ cap structure. An IRES may act as the sole ribosome binding site, or may serve as one of multiple ribosome binding sites of an mRNA. An mRNA that contains more than one functional ribosome binding site may encode several peptides or polypeptides that are translated independently by the ribosomes. Non-limiting examples of IRES sequences that can be used include without limitation, those from picornaviruses (e.g. FMDV), pest viruses (CFFV), polio viruses (PV), encephalomyocarditis viruses (ECMV), foot-and-mouth disease viruses (FMDV), hepatitis C viruses (HCV), classical swine fever viruses (CSFV), murine leukemia virus (MLV), simian immune deficiency viruses (SIV) or cricket paralysis viruses (CrPV).

[2533] In some embodiments, the IRES is from Taura syndrome virus, Triatoma virus, Theiler's encephalomyelitis virus, Simian Virus 40, Solenopsis invicta virus 1, Rhopalosiphum padi virus, Reticuloendotheliosis virus, Human poliovirus 1, Plautia stali intestine virus, Kashmir bee virus, Human rhinovirus 2, Homalodisca coagulata virus-1, Human Immunodeficiency Virus type 1, Homalodisca coagulata virus-1, Himetobi P virus, Hepatitis C virus, Hepatitis A virus, Hepatitis GB virus, Foot and mouth disease virus, Human enterovirus 71, Equine rhinitis virus, Ectropis obliqua picorna-like virus, Encephalomyocarditis virus, Drosophila C Virus, Human coxsackievirus B3, Crucifer tobamovirus, Cricket paralysis virus, Bovine viral diarrhea virus 1, Black Queen Cell Virus, Aphid lethal paralysis virus, Avian encephalomyelitis virus, Acute bee paralysis virus, Hibiscus chlorotic ringspot virus, Classical swine fever virus, Human FGF2, Human SFTPA1, Human AML1/RUNX1, Drosophila antennapedia, Human AQP4, Human ATTR, Human BAG-1, Human BCL2, Human BiP, Human c-IAP1, Human c-myc, Human eIF4G, Mouse NDST4L, Human LEF1, Mouse HIF 1 alpha, Human n.myc, Mouse Gtx, Human p27kip1, Human PDGF2/c-sis, Human p53, Human Pim-1, Mouse Rbm3, Drosophila reaper, Canine Scamper, Drosophila Ubx, Human UNR, Mouse UtrA, Human VEGF-A, Human XIAP, Drosophila hairless, S. cerevisiae TFIID, S. cerevisiae YAP1, tobacco etch virus, turnip crinkle virus, EMCV-A, EMCV-B, EMCV-Bf, EMCV-Cf, EMCV pEC9, Picobirnavirus, HCV QC64, Human Cosavirus E/D, Human Cosavirus F, Human Cosavirus JMY, Rhinovirus NAT001, FIRV14, HRV89, HRVC-02, FIRV-A21, Salivirus A SH1, Salivirus FHB, Salivirus NG-J1, Human Parechovirus 1, Crohivirus B, Yc-3, Rosavirus M-7, Shanbavirus A, Pasivirus A, Pasivirus A 2, Echovirus E14, Human Parechovirus 5, Aichi Virus, Hepatitis A Virus HA16, Phopivirus, CVA10, Enterovirus C, Enterovirus D, Enterovirus J, Human Pegivirus 2, GBV-C GT110, GBV-C K1737, GBV-C Iowa, Pegivirus A 1220, Pasivirus A 3, Sapelovirus, Rosavirus B, Bakunsa Virus, Tremovirus A, Swine Pasivirus 1, PLV-CHN, Pasivirus A, Sicinivirus, Hepacivirus K, Hepacivirus A, BVDV1, Border Disease Virus, BVDV2, CSFV-PK15C, SF573 Dicistrovirus, Hubei Picorna-like Virus, CRPV, Salivirus A BNS, Salivirus A BN2, Salivirus A 02394, Salivirus A GUT, Salivirus A CH, Salivirus A SZ1, Salivirus FHB, CVB3, CVB1, Echovirus 7, CVBS, EVA71, CVA3, CVA12, EV24 or an aptamer to eIF4G.

### Poly-A Tails and 3′ Stabilizing Regions

[2534] In various embodiments, the mRNA payloads of the LNP-based gene editing systems, RNA therapeutics and pharmaceutical compositions thereof described herein, may comprise a poly-A tail.

[2535] During RNA processing, a long chain of adenine nucleotides (poly-A tail) may be added to a polynucleotide such as an mRNA molecules in order to increase stability. Immediately after transcription, the 3′ end of the transcript may be cleaved to free a 3′ hydroxyl. Then poly-A polymerase adds a chain of adenine nucleotides to the free 3′ hydroxyl end. The process, called polyadenylation, adds a poly-A tail of a certain length.

[2536] In some embodiments, the length of a poly-A tail is greater than 30 nucleotides in length. In another embodiment, the poly-A tail is greater than 35 nucleotides in length (e.g., at least or greater than about 35, 40, 45, 50, 55, 60, 70, 80, 90, 100, 120, 140, 160, 180, 200, 250, 300, 350, 400, 450, 500, 600, 700, 800, 900, 1,000, 1,100, 1,200, 1,300, 1,400, 1,500, 1,600, 1,700, 1,800, 1,900, 2,000, 2,500, and 3,000 nucleotides) and no more than about 50, 100, 200, 300, 400, 500, 600, 700, 800, 900, 1000, 2000, or 3000 nucleotides in length. In some embodiments, the mRNA includes a poly-A tail from about 30 to about 3,000 nucleotides (e.g., from 30 to 50, from 30 to 100, from 30 to 250, from 30 to 500, from 30 to 750, from 30 to 1,000, from 30 to 1,500, from 30 to 2,000, from 30 to 2,500, from 50 to 100, from 50 to 250, from 50 to 500, from 50 to 750, from 50 to 1,000, from 50 to 1,500, from 50 to 2,000, from 50 to 2,500, from 50 to 3,000, from 100 to 500, from 100 to 750, from 100 to 1,000, from 100 to 1,500, from 100 to 2,000, from 100 to 2,500, from 100 to 3,000, from 500 to 750, from 500 to 1,000, from 500 to 1,500, from 500 to 2,000, from 500 to 2,500, from 500 to 3,000, from 1,000 to 1,500, from 1,000 to 2,000, from 1,000 to 2,500, from 1,000 to 3,000, from 1,500 to 2,000, from 1,500 to 2,500, from 1,500 to 3,000, from 2,000 to 3,000, from 2,000 to 2,500, and from 2,500 to 3,000).

[2537] In some embodiments, the poly-A tail is designed relative to the length of the overall mRNA. This design may be based on the length of the region coding for a target of interest, the length of a particular feature or region (such as a flanking region), or based on the length of the ultimate product expressed from the mRNA.

[2538] In this context the poly-A tail may be 10, 20, 30, 40, 50, 60, 70, 80, 90, or 100% greater in length than the mRNA or feature thereof. The poly-A tail may also be designed as a fraction of mRNA to which it belongs. In this context, the poly-A tail may be 10, 20, 30, 40, 50, 60, 70, 80, or 90% or more of the total length of the construct or the total length of the construct minus the poly-A tail. Further, engineered binding sites and conjugation of mRNA for poly-A binding protein may enhance expression.

[2539] Additionally, multiple distinct mRNA may be linked together to the PABP (Poly-A binding protein) through the 3′-end using modified nucleotides at the 3′-terminus of the poly-A tail. Transfection experiments can be conducted in relevant cell lines at and protein production can be assayed by ELISA at 12 hr, 24 hr, 48 hr, 72 hr and day 7 post-transfection.

[2540] In some embodiments, the mRNA are designed to include a polyA-G Quartet. The G-quartet is a cyclic hydrogen bonded array of four guanine nucleotides that can be formed by G-rich sequences in both DNA and RNA. In this embodiment, the G-quartet is incorporated at the end of the poly-A tail.

### Stop Codons

[2541] In various embodiments, the mRNA payloads of the LNP-based gene editing systems, RNA therapeutics and pharmaceutical compositions thereof described herein, may comprise one or more translation stop codons. Translational stop codons, UAA, UAG, and UGA, are an important component of the genetic code and signal the termination of translation of an mRNA. During protein synthesis, stop codons interact with protein release factors and this interaction can modulate ribosomal activity thus having an impact translation (Tate W P, et al., (2018) Biochem Soc Trans, 46(6):1615-162).

[2542] A stop element as used herein, refers to a nucleic acid sequence comprising a stop codon. The stop codon can be selected from TGA, TAA and TAG in the case of DNA, or from UGA, UAA and UAG in the case of RNA. In an embodiment, a stop element comprises two consecutive stop codons. In an embodiment, a stop element comprises three consecutive stop codons. In an embodiment, a stop element comprises four consecutive stop codons. In an embodiment, a stop element comprises five consecutive stop codons.

[2543] In some embodiments, the mRNA may include one stop codon. In some embodiments, the mRNA may include two stop codons. In some embodiments, the mRNA may include three stop codons. In some embodiments, the mRNA may include at least one stop codon. In some embodiments, the mRNA may include at least two stop codons. In some embodiments, the mRNA may include at least three stop codons. As non-limiting examples, the stop codon may be selected from TGA, TAA and TAG.

[2544] In other embodiments, the stop codon may be selected from one or more of the following stop elements of Table Y:

TABLE Y
Additional stop elements

| Nucleotide sequence | |
|---|---|
| (5′ to 3′) | Sequence Identifier |
| UGAUAAUAG | |
| UAAUAGUAA | |
| UAAGUCUAA | |
| UAAAGCUAA | |
| UAAGUCUCC | |
| UAAGGCUAA | |
| UAAGCCCCUCCGGGG | SEQ ID NO: 713 |
| UAAAGCUCCCCGGGG | SEQ ID NO: 714 |
| UAAGCCCCU | |
| UAAAGCUCC | |
| UAAAGCUCC | |
| UAGGGUUAA | |
| UAAGCACCC | |
| UGAUAGUAA | |
| UAAAGCGCU | |

[2545] In some embodiments, the mRNA includes the stop codon TGA and one additional stop codon. In a further embodiment the addition stop codon may be TAA.

### MicroRNA Binding Sites and Other Regulatory Elements

[2546] In various embodiments, the mRNA payloads of the LNP-based gene editing systems, RNA therapeutics and pharmaceutical compositions thereof described herein, may comprise one or more regulatory elements, including, but not limited to microRNA (miRNA) binding sites, structured mRNA sequences and/or motifs, artificial binding sites to bind to endogenous nucleic acid binding molecules, and combinations thereof.

### Chemically Unmodified Nucleotides

[2547] In some embodiments, the mRNA payloads of the LNP-based gene editing systems, RNA therapeutics and pharmaceutical compositions thereof described herein are not chemically modified and comprises the standard ribonucleotides consisting of adenosine, guanosine, cytosine and uridine. In some embodiments, nucleotides and nucleosides of the present disclosure comprise standard nucleoside residues such as those present in transcribed RNA (e.g. A, G, C, or U). In some embodiments, nucleotides and nucleosides of the present disclosure comprise standard deoxyribonucleosides such as those present in DNA (e.g. dA, dG, dC, or dT).

### Chemically Modified Nucleotides

[2548] In some embodiments, the mRNA payloads of the LNP-based gene editing systems, RNA therapeutics and pharmaceutical compositions thereof described herein comprise, in some embodiments, comprises at least one chemical modification.

[2549] The terms “chemical modification” and “chemically modified” refer to modification with respect to adenosine (A), guanosine (G), uridine (U), thymidine (T) or cytidine (C) ribonucleosides or deoxyribnucleosides in at least one of their position, pattern, percent or population. Generally, these terms do not refer to the ribonucleotide modifications in naturally occurring 5′-terminal mRNA cap moieties. With respect to a polypeptide, the term “modification” refers to a modification relative to the canonical set 20 amino acids. Polypeptides, as provided herein, are also considered “modified” of they contain amino acid substitutions, insertions or a combination of substitutions and insertions.

[2550] Polynucleotides (e.g., RNA polynucleotides, such as mRNA polynucleotides), in some embodiments, comprise various (more than one) different modifications. In some embodiments, a particular region of a polynucleotide contains one, two or more (optionally different) nucleoside or nucleotide modifications. In some embodiments, a modified RNA polynucleotide (e.g., a modified mRNA polynucleotide), introduced to a cell or organism, exhibits reduced degradation in the cell or organism, respectively, relative to an unmodified polynucleotide. In some embodiments, a modified RNA polynucleotide (e.g., a modified mRNA polynucleotide), introduced into a cell or organism, may exhibit reduced immunogenicity in the cell or organism, respectively (e.g., a reduced innate response).

[2551] Modifications of polynucleotides include, without limitation, those described herein. Polynucleotides (e.g., RNA polynucleotides, such as mRNA polynucleotides) may comprise modifications that are naturally-occurring, non-naturally-occurring or the polynucleotide may comprise a combination of naturally-occurring and non-naturally-occurring modifications. Polynucleotides may include any useful modification, for example, of a sugar, a nucleobase, or an internucleoside linkage (e.g., to a linking phosphate, to a phosphodiester linkage or to the phosphodiester backbone).

[2552] Polynucleotides (e.g., RNA polynucleotides, such as mRNA polynucleotides), in some embodiments, comprise non-natural modified nucleotides that are introduced during synthesis or post-synthesis of the polynucleotides to achieve desired functions or properties. The modifications may be present on an internucleotide linkages, purine or pyrimidine bases, or sugars. The modification may be introduced with chemical synthesis or with a polymerase enzyme at the terminal of a chain or anywhere else in the chain. Any of the regions of a polynucleotide may be chemically modified.

[2553] The present disclosure provides for modified nucleosides and nucleotides of a polynucleotide (e.g., RNA polynucleotides, such as mRNA polynucleotides). A “nucleoside” refers to a compound containing a sugar molecule (e.g., a pentose or ribose) or a derivative thereof in combination with an organic base (e.g., a purine or pyrimidine) or a derivative thereof (also referred to herein as “nucleobase”). A “nucleotide” refers to a nucleoside, including a phosphate group. Modified nucleotides may by synthesized by any useful method, such as, for example, chemically, enzymatically, or recombinantly, to include one or more modified or non-natural nucleosides. Polynucleotides may comprise a region or regions of linked nucleosides. Such regions may have variable backbone linkages. The linkages may be standard phosphodiester linkages, in which case the polynucleotides would comprise regions of nucleotides.

[2554] Modified nucleotide base pairing encompasses not only the standard adenosine-thymine, adenosine-uracil, or guanosine-cytosine base pairs, but also base pairs formed between nucleotides and/or modified nucleotides comprising non-standard or modified bases, wherein the arrangement of hydrogen bond donors and hydrogen bond acceptors permits hydrogen bonding between a non-standard base and a standard base or between two complementary non-standard base structures. One example of such non-standard base pairing is the base pairing between the modified nucleotide inosine and adenine, cytosine or uracil. Any combination of base/sugar or linker may be incorporated into polynucleotides of the present disclosure.

[2555] In some embodiments, polynucleotides (e.g., RNA polynucleotides, such as mRNA polynucleotides) include a combination of at least two (e.g., 2, 3, 4 or more) of the aforementioned modified nucleobases.

[2556] In some embodiments, modified nucleobases in polynucleotides (e.g., RNA polynucleotides, such as mRNA polynucleotides) are selected from the group consisting of pseudouridine (ψ), N1-methylpseudouridine (m¹ψ), N1-ethylpseudouridine, 2-thiouridine, 4′-thiouridine, 5-methylcytosine, 2-thio-1-methyl-1-deaza-pseudouridine, 2-thio-1-methyl-pseudouridine, 2-thio-5-aza-uridine, 2-thio-dihydropseudouridine, 2-thio-dihydrouridine, 2-thio-pseudouridine, 4-methoxy-2-thio-pseudouridine, 4-methoxy-pseudouridine, 4-thio-1-methyl-pseudouridine, 4-thio-pseudouridine, 5-aza-uridine, dihydropseudouridine, 5-methoxyuridine and 2′-O-methyl uridine. In some embodiments, polynucleotides (e.g., RNA polynucleotides, such as mRNA polynucleotides) include a combination of at least two (e.g., 2, 3, 4 or more) of the aforementioned modified nucleobases.

[2557] In some embodiments, modified nucleobases in polynucleotides (e.g., RNA polynucleotides, such as mRNA polynucleotides) are selected from the group consisting of 1-methyl-pseudouridine (m¹ψ), 5-methoxy-uridine (mo⁵U), 5-methyl-cytidine (m⁵C), pseudouridine (ω), α-thio-guanosine and α-thio-adenosine. In some embodiments, polynucleotides includes a combination of at least two (e.g., 2, 3, 4 or more) of the aforementioned modified nucleobases.

[2558] In some embodiments, polynucleotides (e.g., RNA polynucleotides, such as mRNA polynucleotides) comprise pseudouridine (ψ) and 5-methyl-cytidine (m⁵C). In some embodiments, polynucleotides (e.g., RNA polynucleotides, such as mRNA polynucleotides) comprise 1-methyl-pseudouridine (m¹ψ). In some embodiments, polynucleotides (e.g., RNA polynucleotides, such as mRNA polynucleotides) comprise 1-methyl-pseudouridine (m¹ψ) and 5-methyl-cytidine (m⁵C). In some embodiments, polynucleotides (e.g., RNA polynucleotides, such as mRNA polynucleotides) comprise 2-thiouridine (s²U). In some embodiments, polynucleotides (e.g., RNA polynucleotides, such as mRNA polynucleotides) comprise 2-thiouridine and 5-methyl-cytidine (m⁵C). In some embodiments, polynucleotides (e.g., RNA polynucleotides, such as mRNA polynucleotides) comprise methoxy-uridine (mo⁵U). In some embodiments, polynucleotides (e.g., RNA polynucleotides, such as mRNA polynucleotides) comprise 5-methoxy-uridine (mo⁵U) and 5-methyl-cytidine (m⁵C). In some embodiments, polynucleotides (e.g., RNA polynucleotides, such as mRNA polynucleotides) comprise 2′-O-methyl uridine. In some embodiments polynucleotides (e.g., RNA polynucleotides, such as mRNA polynucleotides) comprise 2′-O-methyl uridine and 5-methyl-cytidine (m⁵C). In some embodiments, polynucleotides (e.g., RNA polynucleotides, such as mRNA polynucleotides) comprise N6-methyl-adenosine (m⁶A). In some embodiments, polynucleotides (e.g., RNA polynucleotides, such as mRNA polynucleotides) comprise N6-methyl-adenosine (m⁶A) and 5-methyl-cytidine (mC).

[2559] In some embodiments, polynucleotides (e.g., RNA polynucleotides, such as mRNA polynucleotides) are uniformly modified (e.g., fully modified, modified throughout the entire sequence) for a particular modification. For example, a polynucleotide can be uniformly modified with 5-methyl-cytidine (m⁵C), meaning that all cytosine residues in the mRNA sequence are replaced with 5-methyl-cytidine (m⁵C). Similarly, a polynucleotide can be uniformly modified for any type of nucleoside residue present in the sequence by replacement with a modified residue such as those set forth above.

[2560] Exemplary nucleobases and nucleosides having a modified cytosine include N4-acetyl-cytidine (ac4C), 5-methyl-cytidine (m5C), 5-halo-cytidine (e.g., 5-iodo-cytidine), 5-hydroxymethyl-cytidine (hm5C), 1-methyl-pseudoisocytidine, 2-thio-cytidine (s2C), and 2-thio-5-methyl-cytidine.

[2561] In some embodiments, a modified nucleobase is a modified uridine. Exemplary nucleobases and In some embodiments, a modified nucleobase is a modified cytosine. nucleosides having a modified uridine include 5-cyano uridine, and 4′-thio uridine.

[2562] The polynucleotides of the present disclosure may be partially or fully modified along the entire length of the molecule. For example, one or more or all or a given type of nucleotide (e.g., purine or pyrimidine, or any one or more or all of A, G, U, C) may be uniformly modified in a polynucleotide of the invention, or in a given predetermined sequence region thereof (e.g., in the mRNA including or excluding the polyA tail). In some embodiments, all nucleotides X in a polynucleotide of the present disclosure (or in a given sequence region thereof) are modified nucleotides, wherein X may any one of nucleotides A, G, U, C, or any one of the combinations A+G, A+U, A+C, G+U, G+C, U+C, A+G+U, A+G+C, G+U+CorA+G+C.

[2563] The polynucleotide may contain from about 1% to about 100% modified nucleotides (either in relation to overall nucleotide content, or in relation to one or more types of nucleotide, i.e., any one or more of A, G, U or C) or any intervening percentage (e.g., from 1% to 20%, from 1% to 25%, from 1% to 50%, from 1% to 60%, from 1% to 70%, from 1% to 80%, from 1% to 90%, from 1% to 95%, from 10% to 20%, from 10% to 25%, from 10% to 50%, from 10% to 60%, from 10% to 70%, from 10% to 80%, from 10% to 90%, from 10% to 95%, from 10% to 100%, from 20% to 25%, from 20% to 50%, from 20% to 60%, from 20% to 70%, from 20% to 80%, from 20% to 90%, from 20% to 95%, from 20% to 100%, from 50% to 60%, from 50% to 70%, from 50% to 80%, from 50% to 90%, from 50% to 95%, from 50% to 100%, from 70% to 80%, from 70% to 90%, from 70% to 95%, from 70% to 100%, from 80% to 90%, from 80% to 95%, from 80% to 100%, from 90% to 95%, from 90% to 100%, and from 95% to 100%). It will be understood that any remaining percentage is accounted for by the presence of unmodified A, G, U, or C.

[2564] The polynucleotides may contain at a minimum 1% and at maximum 100% modified nucleotides, or any intervening percentage, such as at least 5% modified nucleotides, at least 10% modified nucleotides, at least 25% modified nucleotides, at least 50% modified nucleotides, at least 80% modified nucleotides, or at least 90% modified nucleotides. For example, the polynucleotides may contain a modified pyrimidine such as a modified uracil or cytosine. In some embodiments, at least 5%, at least 10%, at least 25%, at least 50%, at least 80%, at least 90% or 100% of the uracil in the polynucleotide is replaced with a modified uracil (e.g., a 5-substituted uracil). The modified uracil can be replaced by a compound having a single unique structure, or can be replaced by a plurality of compounds having different structures (e.g., 2, 3, 4 or more unique structures). In some embodiments, at least 5%, at least 10%, at least 25%, at least 50%, at least 80%, at least 90% or 100% of the cytosine in the polynucleotide is replaced with a modified cytosine (e.g., a 5-substituted cytosine). The modified cytosine can be replaced by a compound having a single unique structure, or can be replaced by a plurality of compounds having different structures (e.g., 2, 3, 4 or more unique structures).

C. Circular mRNA payloads

[2565] In various embodiments, the LNP-based pharmaceutical compositions described herein, e.g., LNP-based gene editing systems, may include one or more circular mRNA molecules or “oRNAs.” In various embodiments, the circular mRNA payloads may encode one or more components of the herein described gene editing systems or other therapeutic protein of interest. For example, a circular mRNA payload may encode an amino acid sequence-programmable DNA binding domain (e.g., TALENS and zinc finger-binding domains) or a nucleic acid sequence-programmable DNA binding domain (e.g., CRISPR Cas9, CRISPR Cas12a, CRISPR Cas12f, CRISPR Cas13a, CRISPR Cas13b, or TnpB).

[2566] The circular mRNA payloads may also encode, depending upon the nature of the gene editing system, one or more effector domains that provide various functionalities that facilitate changes in nucleotide sequence and/or gene expression, such as, but not limited to, single-strand DNA binding proteins, nucleases, endonucleases, exonucleases, deaminases (e.g., cytidine deaminases or adenosine deaminases), polymerases (e.g., reverse transcriptases), integrases, recombinases, etc., and fusion proteins comprising one or more functional domains linked together.

[2567] Circular RNA described herein are polyribonucleotides that form a continuous structure through covalent or non-covalent bonds. Due to the circular structure, oRNAs have improved stability, increased half-life, reduced immunogenicity, and/or improved functionality (e.g., of a function described herein) compared to a corresponding linear RNA.

[2568] In some embodiments, an oRNA binds a target. In some embodiments, an oRNA binds a substrate. In some embodiments, an oRNA binds a target and binds a substrate of the target. In some embodiments, an oRNA binds a target and mediates modulation of a substrate of the target. In some embodiments, an oRNA brings together a target and its substrate to mediate modification of the substrate, e.g., post-translational modification. In some embodiments, an oRNA brings together a target and its substrate to mediate a cellular process (e.g., alters protein degradation or signal transduction) involving the substrate. In some embodiments, a target is a target protein and a substrate is a substrate protein.

[2569] In some embodiments, an oRNA comprises a conjugation moiety for binding to chemical compound. The conjugation moiety can be a modified polyribonucleotide. The chemical compound can be conjugated to the oRNA by the conjugation moiety. In some embodiments, the chemical compound binds to a target and mediates modulation of a substrate of the target. In some embodiments, an oRNA binds a substrate of a target and a chemical compound conjugated to the oRNA by the conjugation moiety binds the target to bring together the target and its substrate to mediate modification of the substrate, e.g., post-translational modification. In some embodiments, an oRNA binds a substrate of a target and a chemical compound conjugated to the oRNA by the conjugation moiety binds the target to bring together the target and its substrate to mediate modification of the substrate to mediate a cellular process (e.g., alters protein degradation or signal transduction) involving the substrate. In some embodiments, a target is a target protein and a substrate is a substrate protein.

[2570] In some embodiments, the oRNA may be non-immunogenic in a mammal (e.g., a human, non-human primate, rabbit, rat, and mouse).

[2571] In some embodiments, the oRNA may be capable of replicating or replicates in a cell from an aquaculture animal (e.g., fish, crabs, shrimp, oysters etc.), a mammalian cell, a cell from a pet or zoo animal (e.g., cats, dogs, lizards, birds, lions, tigers and bears etc.), a cell from a farm or working animal (e.g., horses, cows, pigs, chickens etc.), a human cell, cultured cells, primary cells or cell lines, stem cells, progenitor cells, differentiated cells, germ cells, cancer cells (e.g., tumorigenic, metastatic), non-tumorigenic cells (e.g., normal cells), fetal cells, embryonic cells, adult cells, mitotic cells, non-mitotic cells, or any combination thereof.

[2572] In one aspect, provided herein is a pharmaceutical composition comprising: a circular RNA comprising, in the following order, a 3′ group I intron fragment, an Internal Ribosome Entry Site (IRES), an expression sequence encoding a polypeptide (e.g., a nucleobase editing system or component thereof), and a 5′ group I intron fragment, and a transfer vehicle comprising at least one of (i) an ionizable lipid, (ii) a structural lipid, and (iii) a PEG-modified lipid, wherein the transfer vehicle is capable of delivering the circular RNA polynucleotide to a cell (e.g., a human cell, such as an immune cell present in a human subject), such that the polypeptide is translated in the cell.

[2573] In some embodiments, the pharmaceutical composition is formulated for intravenous administration to the human subject in need thereof. In some embodiments, the 3′ group I intron fragment and 5′ group I intron fragment are Anabaena group I intron fragments.

[2574] In certain embodiments, the 3′ intron fragment and 5′ intron fragment are defined by the L9a-5 permutation site in the intact intron. In certain embodiments, the 3′ intron fragment and 5′ intron fragment are defined by the L8-2 permutation site in the intact intron.

[2575] In some embodiments, the IRES is from Taura syndrome virus, Tiiatoma virus, Theiler's encephalomyelitis virus, Simian Virus 40, Solenopsis invicta virus 1, Rhopalosiphum padi virus, Reticuloendotheliosis virus, Human poliovirus 1, Plautia stall intestine virus, Kashmir bee virus, Human rhinovirus 2, Homalodisca coagulata virus-1, Human Immunodeficiency Virus type 1, Homalodisca coagulata virus-1, Himetobi P virus, Hepatitis C virus, Hepatitis A virus, Hepatitis GB virus, Foot and mouth disease virus, Human enterovirus 71, Equine rhinitis virus, Ectropis obliqua picoma-like virus, Encephalomyocarditis virus, Drosophila C Virus, Human coxsackievirus B3, Crucifer tobamovirus, Cricket paralysis virus, Bovine viral diarrhea virus 1, Black Queen Cell Virus, Aphid lethal paralysis virus, Avian encephalomyelitis virus, Acute bee paralysis virus, Hibiscus chlorotic ringspot virus, Classical swine fever virus, Human FGF2, Human SFTPA1, Human AML1/RUNX1, Drosophila antennapedia, Human AQP4, Human AT1R, Human BAG-1, Human BCL2, Human BiP, Human c-IAP1, Human c-myc, Human eIF4G, Mouse NDST4L, Human LEF1, Mouse HIF1 alpha, Human n.myc, Mouse Gtx, Human p27kip1, Human PDGF2/c-sis, Human p53, Human Pim-1, Mouse Rbm3, Drosophila reaper, Canine Scamper, Drosophila Ubx, Human UNR, Mouse UtrA, Human VEGF-A, Human XIAP, Drosophila hairless, S. cerevisiae TFIID, S. cerevisiae YAP1, tobacco etch virus, turnip crinkle virus, EMCV-A, EMCV-B, EMCV-Bf, EMCV-Cf, EMCV pEC9, Picobirnavirus, HCV QC64, Human Cosavirus E/D, Human Cosavirus F, Human Cosavirus JMY, Rhinovirus NAT001, FIRV14, HRV89, HRVC-02, HRV-A21, Salivirus A SHI, Salivirus FHB, Salivirus NG-J1, Human Parechovirus 1, Crohivirus B, Yc-3, Rosavirus M-7, Shanbavirus A, Pasivirus A, Pasivirus A 2, Echovirus E14, Human Parechovirus 5, Aichi Virus, Hepatitis A Virus HA 16, Phopivirus, CVA10, Enterovirus C, Enterovirus D, Enterovirus J, Human Pegivirus 2, GBV-C GT110, GBV-C K1737, GBV-C Iowa, Pegivirus A 1220, Pasivirus A 3, Sapelovirus, Rosavirus B, Bakunsa Virus, Tremovirus A, Swine Pasivirus 1, PLV-CHN, Pasivirus A, Sicinivirus, Hepacivirus K, Hepacivirus A, BVDV1, Border Disease Virus, BVDV2, CSFV-PK15C, SF573 Dicistravirus, Hubei Picoma-like Virus, CRPV, Salivirus A BNS, Salivirus A BN2, Salivirus A 02394, Salivirus A GUT, Salivirus A CH, Salivirus A SZ1, Salivirus FHB, CVB3, CVB1, Echovirus 7, CVBS, EVA71, CVA3, CVA12, EV24 or an aptamer to eIF4G.

[2576] In some embodiments, the IRES comprises a CVB3 IRES or a fragment or variant thereof. In some embodiments, the pharmaceutical composition comprises a first internal spacer between the 3′ group I intron fragment and the IRES, and a second internal spacer between the expression sequence and the 5′ group I intron fragment. In certain embodiments, the first and second internal spacers each have a length of about 10 to about 60 nucleotides.

[2577] In some embodiments, the circular mRNA comprises a nucleotide sequence encoding a polypeptide of interest, such as a nucleobase editing system or therapeutic protein (e.g., a CAR or TCR complex protein).

[2578] In some embodiments, the LNP-based nucleobase editing systems, RNA therapeutics and pharmaceutical compositions described herein further comprise a targeting moiety. In certain embodiments, the targeting moiety mediates receptor-mediated endocytosis or direct fusion of the delivery vehicle (LNPs) into selected cells of a selected cell population or tissue in the absence of cell isolation or purification. In certain embodiments, the targeting moiety is capable of binding to a protein selected from the group CD3, CD4, CD8, CDS, CD7, PD-1, 4-1BB, CD28, Clq, and CD2. In certain embodiments, the targeting moiety comprises an antibody specific for a macrophage, dendritic cell, NK cell, NKT, or T cell antigen. In certain embodiments, the targeting moiety comprises a scFv, nanobody, peptide, minibody, polynucleotide aptamer, heavy chain variable region, light chain variable region or fragment thereof.

[2579] In some embodiments, the LNP-based nucleobase editing systems, RNA therapeutics and pharmaceutical compositions described herein are administered in an amount effective to treat a disease in the human subject (e.g., wherein the disease can be cancer, muscle disorder, or CNS disorder, etc.). In some embodiments, the LNP-based nucleobase editing systems, RNA therapeutics and pharmaceutical compositions have an enhanced safety profile when compared to a pharmaceutical composition comprising T cells or vectors comprising exogenous DNA encoding the same polypeptide.

[2580] In some embodiments, the LNP-based nucleobase editing systems and pharmaceutical compositions thereof are administered in an amount effective to induce a desire precise edit in a genome. In some embodiments, the LNP-based nucleobase editing systems and pharmaceutical compositions have an enhanced safety profile when compared to state of the art gene editing delivery compositions.

[2581] In another aspect, the present disclosure provides a circular RNA comprising, in the following order, a 3′ group I intron fragment, an Internal Ribosome Entry Site (IRES), an expression sequence encoding a polypeptide (e.g., a nucleobase editing system or component thereof), and a 5′ group I intron fragment.

[2582] In some embodiments, the 3′ group I intron fragment and 5′ group I intron fragment are Anabaena group I intron fragments. In certain embodiments, the 3′ intron fragment and 5′ intron fragment are defined by the L9a-5 permutation site in the intact intron. In certain embodiments, the 3′ intron fragment and 5′ intron fragment are defined by the L8-2 permutation site in the intact intron. In certain embodiments, the IRES comprises a CVB3 IRES or a fragment or variant thereof.

[2583] In some embodiments, the circular RNA comprises a first internal spacer between the 3′ group I intron fragment and the IRES, and a second internal spacer between the expression sequence and the 5′ group I intron fragment.

[2584] In certain embodiments, the first and second internal spacers each have a length of about 10 to about 60 nucleotides.

[2585] In some embodiments, the circular RNA payload of the LNP-based nucleobase editing systems, RNA therapeutics and pharmaceutical compositions described herein consists of natural nucleotides. In some embodiments, the circular RNA further comprises a second expression sequence encoding a therapeutic protein. In some embodiments, the therapeutic protein comprises a checkpoint inhibitor. In certain embodiments, the therapeutic protein comprises a cytokine.

[2586] In some embodiments, the circular RNA payload of the LNP-based nucleobase editing systems, RNA therapeutics and pharmaceutical compositions described herein consists of natural nucleotides.

[2587] In some embodiments, the circular RNA payload LNP-based nucleobase editing systems, RNA therapeutics and pharmaceutical compositions described herein comprises a nucleotide sequence that is codon optimized, either partially or fully. In some embodiments, the circular RNA is optimized to lack at least one microRNA binding site present in an equivalent pre-optimized polynucleotide. In some embodiments, the circular RNA is optimized to lack at least one endonuclease susceptible site present in an equivalent pre-optimized polynucleotide. In some embodiments, the circular RNA is optimized to lack at least one RNA-editing susceptible site present in an equivalent pre-optimized polynucleotide.

[2588] In some embodiments, the circular RNA payload of the LNP-based nucleobase editing systems, RNA therapeutics and pharmaceutical compositions described herein has an in vivo functional half-life in humans greater than that of an equivalent linear RNA having the same expression sequence. In some embodiments, the circular RNA has a length of about 100 nucleotides to about 10 kilobases. In some embodiments, the circular RNA has a functional half-life of at least about 20 hours. In some embodiments, the circular RNA has a duration of therapeutic effect in a human cell of at least about 20 hours. In some embodiments, the circular RNA has a duration of therapeutic effect in a human cell greater than or equal to that of an equivalent linear RNA comprising the same expression sequence. In some embodiments, the circular RNA has a functional half-life in a human cell greater than or equal to that of an equivalent linear RNA comprising the same expression sequence.

[2589] In some embodiments, the circular RNA payload of the LNP-based nucleobase editing systems, RNA therapeutics and pharmaceutical compositions described herein has a half-life of at least that of a linear counterpart. In some embodiments, the oRNA has a half-life that is increased over that of a linear counterpart. In some embodiments, the half-life is increased by about 5%, 10%, 15%, 20%, 25%, 30%, 35%, 40%, 45%, 50%, or greater. In some embodiments, the oRNA has a half-life or persistence in a cell for at least about 1 hour to about 30 days, or at least about 2 hours, 6 hours, 12 hours, 18 hours, 24 hours (1 day), 2 days, 3, days, 4 days, 5 days, 6 days, 7 days, 8 days, 9 days, 10 days, 11 days, 12 days, 13 days, 14 days, 15 days, 16 days, 17 days, 18 days, 19 days, 20 days, 21 days, 22 days, 23 days, 24 days, 25 days, 26 days, 27 days, 28 days, 29 days, 30 days, 60 days, or longer or any time therebetween. In some embodiments, the oRNA has a half-life or persistence in a cell for no more than about 10 mins to about 7 days, or no more than about 1 hour, 2 hours, 3 hours, 4 hours, 5 hours, 6 hours, 7 hours, 8 hours, 9 hours, 10 hours, 11 hours, 12 hours, 13 hours, 14 hours, 15 hours, 16 hours, 17 hours, 18 hours, 19 hours, 20 hours, 21 hours, 22 hours, 24 hours (1 day), 36 hours (1.5 days), 48 hours (2 days), 60 hours (2.5 days), 72 hours (3 days), 4 days, 5 days, 6 days, or 7 days.

[2590] In some embodiments, the circular RNA payload of the LNP-based nucleobase editing systems, RNA therapeutics and pharmaceutical compositions described herein has a half-life or persistence in a cell while the cell is dividing. In some embodiments, the oRNA has a half-life or persistence in a cell post division.

[2591] In certain embodiments, the circular RNA payload of the LNP-based nucleobase editing systems, RNA therapeutics and pharmaceutical compositions described herein has a half-life or persistence in a dividing cell for greater than about 10 minutes to about 30 days, or at least about 10 minutes, 15 minutes, 30 minutes, 45 minutes, 1 hour, 2 hours, 3 hours, 4 hours, 5 hours, 6 hours, 7 hours, 8 hours, 9 hours, 10 hours, 11 hours, 12 hours, 13 hours, 14 hours, 15 hours, 16 hours, 17 hours, 18 hours, 24 hours (1 day), 2 days, 3, days, 4 days, 5 days, 6 days, 7 days, 8 days, 9 days, 10 days, 11 days, 12 days, 13 days, 14 days, 15 days, 16 days, 17 days, 18 days, 19 days, 20 days, 21 days, 22 days, 23 days, 24 days, 25 days, 26 days, 27 days, 28 days, 29 days, 30 days, 60 days, or longer or any time therebetween.

[2592] In some embodiments, the circular RNA payload of the LNP-based nucleobase editing systems, RNA therapeutics and pharmaceutical compositions described herein modulates a cellular function, e.g., transiently or long term. In certain embodiments, the cellular function is stably altered, such as a modulation that persists for at least about 1 hour to about 30 days, or at least about 2 hours, 6 hours, 12 hours, 18 hours, 24 hours (1 day), 2 days, 3, days, 4 days, 5 days, 6 days, 7 days, 8 days, 9 days, 10 days, 11 days, 12 days, 13 days, 14 days, 15 days, 16 days, 17 days, 18 days, 19 days, 20 days, 21 days, 22 days, 23 days, 24 days, 25 days, 26 days, 27 days, 28 days, 29 days, 30 days, 60 days, or longer. In certain embodiments, the cellular function is transiently altered, e.g., such as a modulation that persists for no more than about 30 mins to about 7 days, or no more than about 30 minutes, 45 minutes, 1 hour, 2 hours, 3 hours, 4 hours, 5 hours, 6 hours, 7 hours, 8 hours, 9 hours, 10 hours, 11 hours, 12 hours, 13 hours, 14 hours, 15 hours, 16 hours, 17 hours, 18 hours, 19 hours, 20 hours, 21 hours, 22 hours, 23 hours, 24 hours (1 day), 36 hours (1.5 days), 48 hours (2 days), 60 hours (2.5 days), 72 hours (3 days), 4 days, 5 days, 6 days, or 7 days.

[2593] In some embodiments, the circular RNA payload of the LNP-based nucleobase editing systems, RNA therapeutics and pharmaceutical compositions described herein is at least about 20 nucleotides, at least about 30 nucleotides, at least about 40 nucleotides, at least about 50 nucleotides, at least about 75 nucleotides, at least about 100 nucleotides, at least about 200 nucleotides, at least about 300 nucleotides, at least about 400 nucleotides, at least about 500 nucleotides, at least about 1,000 nucleotides, at least about 2,000 nucleotides, at least about 5,000 nucleotides, at least about 6,000 nucleotides, at least about 7,000 nucleotides, at least about 8,000 nucleotides, at least about 9,000 nucleotides, at least about 10,000 nucleotides, at least about 12,000 nucleotides, at least about 14,000 nucleotides, at least about 15,000 nucleotides, at least about 16,000 nucleotides, at least about 17,000 nucleotides, at least about 18,000 nucleotides, at least about 19,000 nucleotides, or at least about 20,000 nucleotides. In some embodiments, the oRNA may be of a sufficient size to accommodate a binding site for a ribosome.

[2594] In some embodiments, the maximum size of the circular RNA payload of the LNP-based nucleobase editing systems, RNA therapeutics and pharmaceutical compositions described herein may be limited by the ability of packaging and delivering the RNA to a target. In some embodiments, the size of the oRNA is a length sufficient to encode polypeptides, and thus, lengths of at least 20,000 nucleotides, at least 15,000 nucleotides, at least 10,000 nucleotides, at least 7,500 nucleotides, or at least 5,000 nucleotides, at least 4,000 nucleotides, at least 3,000 nucleotides, at least 2,000 nucleotides, at least 1,000 nucleotides, at least 500 nucleotides, at least 400 nucleotides, at least 300 nucleotides, at least 200 nucleotides, at least 100 nucleotides may be useful.

[2595] In some embodiments, the circular RNA payload of the LNP-based nucleobase editing systems, RNA therapeutics and pharmaceutical compositions described herein comprises one or more elements described elsewhere herein. In some embodiments, the elements may be separated from one another by a spacer sequence or linker. In some embodiments, the elements may be separated from one another by 1 nucleotide, 2 nucleotides, about 5 nucleotides, about 10 nucleotides, about 15 nucleotides, about 20 nucleotides, about 30 nucleotides, about 40 nucleotides, about 50 nucleotides, about 60 nucleotides, about 80 nucleotides, about 100 nucleotides, about 150 nucleotides, about 200 nucleotides, about 250 nucleotides, about 300 nucleotides, about 400 nucleotides, about 500 nucleotides, about 600 nucleotides, about 700 nucleotides, about 800 nucleotides, about 900 nucleotides, about 1000 nucleotides, up to about 1 kb, at least about 1000 nucleotides.

[2596] In some embodiments, one or more elements are contiguous with one another, e.g., lacking a spacer element.

[2597] In some embodiments, one or more elements is conformationally flexible. In some embodiments, the conformational flexibility is due to the sequence being substantially free of a secondary structure.

[2598] In some embodiments, the circular RNA payload of the LNP-based nucleobase editing systems, RNA therapeutics and pharmaceutical compositions described herein comprises a secondary or tertiary structure that accommodates a binding site for a ribosome, translation, or rolling circle translation.

[2599] In some embodiments, the circular RNA payload of the LNP-based nucleobase editing systems, RNA therapeutics and pharmaceutical compositions described herein comprises particular sequence characteristics. For example, the oRNA may comprise a particular nucleotide composition. In some such embodiments, the oRNA may include one or more purine rich regions (adenine or guanosine). In some such embodiments, the oRNA may include one or more purine rich regions (adenine or guanosine). In some embodiments, the oRNA may include one or more AU rich regions or elements (AREs). In some embodiments, the oRNA may include one or more adenine rich regions.

[2600] In some embodiments, the circular RNA payload of the LNP-based nucleobase editing systems, RNA therapeutics and pharmaceutical compositions described herein comprises one or more modifications described elsewhere herein.

[2601] In some embodiments, the circular RNA payload of the LNP-based nucleobase editing systems, RNA therapeutics and pharmaceutical compositions described herein comprises one or more expression sequences and is configured for persistent expression in a cell of a subject in vivo. In some embodiments, the oRNA is configured such that expression of the one or more expression sequences in the cell at a later time point is equal to or higher than an earlier time point. In such embodiments, the expression of the one or more expression sequences can be either maintained at a relatively stable level or can increase over time. The expression of the expression sequences can be relatively stable for an extended period of time. For instance, in some cases, the expression of the one or more expression sequences in the cell over a time period of at least 7, 8, 9, 10, 12, 14, 16, 18, 20, 22, 23 or more days does not decrease by 50%, 45%, 40%, 35%, 30%, 25%, 20%, 15%, 10%, or 5%. In some cases, in some cases, the expression of the one or more expression sequences in the cell is maintained at a level that does not vary by more than 50%, 45%, 40%, 35%, 30%, 25%, 20%, 15%, 10%, or 5% for at least 7, 8, 9, 10, 12, 14, 16, 18, 20, 22, 23 or more days.

### Regulatory Elements

[2602] In some embodiments, the circular RNA payload of the LNP-based nucleobase editing systems, RNA therapeutics and pharmaceutical compositions described herein comprises one or more regulatory elements. As used herein, a “regulatory element” is a sequence that modifies expression of an expression sequence, e.g., a nucleotide sequence encoding a nucleobase editing system or a therapeutic protein, i.e., a coding region of interest (CROI). The regulatory element may include a sequence that is located adjacent to a coding region of interest encoded on the circular RNA payload. The regulatory element may be operatively linked to a nucleotide sequence of the circular RNA that encodes a coding region of interest (e.g., a nucleobase editing system or therapeutic polypeptide).

[2603] In some embodiments, a regulatory element may increase an amount of expression of a coding region of interest encoded on the circular RNA payload as compared to an amount expressed when no regulatory element exists.

[2604] In some embodiments, a regulatory element may comprise a sequence to selectively initiates or activates translation of a coding sequence of interest encoded on the circular RNA payload.

[2605] In some embodiments, a regulatory element may comprise a sequence to initiate degradation of the oRNA or the payload or cargo. Non-limiting examples of the sequence to initiate degradation includes, but is not limited to, riboswitch aptazyme and miRNA binding sites.

[2606] In some embodiments, a regulatory element can modulate translation of a coding region of interest encoded on the oRNA. The modulation can create an increase (enhancer) or decrease (suppressor) in the expression of the coding region of interest. The regulatory element may be located adjacent to the CROI (e.g., on one side or both sides of the CROI).

### Translation Initiation Sequence

[2607] In some embodiments, a translation initiation sequence functions as a regulatory element. In some embodiments, the translation initiation sequence comprises an AUG/ATG codon. In some embodiments, a translation initiation sequence comprises any eukaryotic start codon such as, but not limited to, AUG/ATG, CUG/CTG, GUG/GTG, UUG/TTG, ACG, AUC/ATC, AUU, AAG, AUA/ATA, or AGG. In some embodiments, a translation initiation sequence comprises a Kozak sequence. In some embodiments, translation begins at an alternative translation initiation sequence, e.g., translation initiation sequence other than AUG/ATG codon, under selective conditions, e.g., stress induced conditions. As a non-limiting example, the translation of the circular polyribonucleotide may begin at alternative translation initiation sequence, such as ACG. As another non-limiting example, the circular polyribonucleotide translation may begin at alternative translation initiation sequence, CUG/CTG. As another non-limiting example, the translation may begin at alternative translation initiation sequence, GUG/GTG. As yet another non-limiting example, the translation may begin at a repeat-associated non-AUG (RAN) sequence such as an alternative translation initiation sequence that includes short stretches of repetitive RNA e.g. CGG, GGGGCC, CAG, or CTG.

[2608] In some embodiments, the oRNA encodes a polypeptide or peptide and may comprise a translation initiation sequence. The translation initiation sequence may comprise, but is not limited to a start codon, a non-coding start codon, a Kozak sequence or a Shine-Dalgarno sequence. The translation initiation sequence may be located adjacent to the payload or cargo (e.g., on one side or both sides of the coding region of interest).

[2609] In some embodiments, the translation initiation sequence provides conformational flexibility to the oRNA. In some embodiments, the translation initiation sequence is within a substantially single stranded region of the oRNA.

[2610] The oRNA may include more than 1 start codon such as, but not limited to, at least 2, at least 3, at least 4, at least 5, at least 6, at least 7, at least 8, at least 9, at least 10, at least 11, at least 12, at least 13, at least 14, at least 15 or more than 15 start codons. Translation may initiate on the first start codon or may initiate downstream of the first start codon.

[2611] In some embodiments, the oRNA may initiate at a codon which is not the first start codon, e.g., AUG. Translation of the circular polyribonucleotide may initiate at an alternative translation initiation sequence, such as, but not limited to, ACG, AGG, AAG, CUG/CTG, GUG/GTG, AUA/ATA, AUU/ATT, UUG/TTG. In some embodiments, translation begins at an alternative translation initiation sequence under selective conditions, e.g., stress induced conditions. As a non-limiting example, the translation of the oRNA may begin at alternative translation initiation sequence, such as ACG. As another non-limiting example, the oRNA translation may begin at alternative translation initiation sequence, CUG/CTG. As yet another non-limiting example, the oRNA translation may begin at alternative translation initiation sequence, GTG/GUG. As yet another non-limiting example, the oRNA may begin translation at a repeat-associated non-AUG (RAN) sequence, such as an alternative translation initiation sequence that includes short stretches of repetitive RNA e.g. CGG, GGGGCC, CAG, CTG.

### IRES Sequences

[2612] In some embodiments, the oRNA described herein comprises an internal ribosome entry site (IRES) element capable of engaging an eukaryotic ribosome. In some embodiments, the IRES element is at least about 5 nucleotides, at least about 8 nucleotides, at least about 9 nucleotides, at least about 10 nucleotides, at least about 15 nucleotides, at least about 20 nucleotides, at least about 25 nucleotides, at least about 30 nucleotides, at least about 40 nucleotides, at least about 50 nucleotides, at least about 100 nucleotides, at least about 200 nucleotides, at least about 250 nucleotides, at least about 350 nucleotides, or at least about 500 nucleotides. In one embodiment, the IRES element is derived from the DNA of an organism including, but not limited to, a virus, a mammal, and a Drosophila. Such viral DNA may be derived from, but is not limited to, picornavirus complementary DNA (cDNA), with encephalomyocarditis virus (EMCV) cDNA and poliovirus cDNA. In one embodiment, Drosophila DNA from which an IRES element is derived includes, but is not limited to, an Antennapedia gene from Drosophila melanogaster.

[2613] In some embodiments, the IRES element is at least partially derived from a virus, for instance, it can be derived from a viral IRES element, such as ABPV_IGRpred, AEV, ALPV_IGRpred, BQCV_IGRpred, BVDV1_1-385, BVDV129-391, CrPV_5NCR, CrPV_IGR, crTMV_IREScp, crTMV_IRESmp75, crTMV_IRESmp228, crTMV_IREScp, crTMV_IREScp, CSFV, CVB3, DCV_IGR, EMCV-R, EoPV_5NTR, ERAV 245-961, ERBV 162-920, EV71_1-748, FeLV-Notch2, FMDV_type_C, GBV-A, GBV-B, GBV-C, gypsy_env, gypsyD5, gypsyD2, HAV_HM175, HCV_type_1a, HiPV_IGRpred, HIV-1, HoCV1_IGRpred, HRV-2, IAPV_IGRpred, idefix, KBV_IGRpred, LINE-1_ORF1_-101_to_-1, LINE-1_ORF1-302_to_-202, LINE-1_ORF2-138_to_-86, LINE-1_ORF1_-44 to_-1, PSIV_IGR, PV_type1_Mahoney, PV_type3_Leon, REV-A, RhPV_5NCR, RhPV_IGR, SINV1_IGRpred, SV40_661-830, TMEV, TMV_UI_IRESmp228, TRV_5NTR, TrV_IGR, or TSV_IGR. In some embodiments, the IRES element is at least partially derived from a cellular IRES, such as AML1/RUNX1, Antp-D, Antp-DE, Antp-CDE, Apaf-1, Apaf-1, AQP4, ATTR earl, AT1R_var2, AT1R_var3, AT1R_var4, BAG1_p36delta236 nt, BAG1_p36, BCL2, BiP_-222_-3, c-IAP1_285-1399, c-IAP1_1313-1462, c-jun, c-myc, Cat-1224, CCND1, DAPS, eIF4G, eIF4GI-ext, eIF4GII, eIF4GII-long, ELG1, ELH, FGF1A, FMR1, Gtx-133-141, Gtx-1-166, Gtx-1-120, Gtx-1-196, hairless, HAP4, HIF1a, hSNM1, Hsp101, hsp70, hsp70, Hsp90, IGF2_leader2, Kv1.4_1.2, L-myc, LamB1_-335_-1, LEF1, MNT_75-267, MNT_36-160, MTG8a, MYB, MYT2_997-1152, n-MYC, NDST1, NDST2, NDST3, NDST4L, NDST4S, NRF_-653_-17, NtHSF1, ODC1, p27kip1, 03_128-269, PDGF2/c-sis, Pim-1, PITSLRE_p58, Rbm3, reaper, Scamper, TFIID, TIF4631, Ubx_1-966, Ubx_373-961, UNR, Ure2, UtrA, VEGF-A-133-1, XIAP_5-464, XIAP_305-466, or YAP1.

[2614] In another embodiment, the IRES is an IRES sequence from Coxsackievirus B3 (CVB3), the protein coding region encodes Guassia luciferase (Gluc) and the spacer sequences are polyA-C.

[2615] In some embodiments, the IRES, if present, is at least about 50 nucleotides in length. In one embodiment, the vector comprises an IRES that comprises a natural sequence. In one embodiment, the vector comprises an IRES that comprises a synthetic sequence.

[2616] An IRES may act as the sole ribosome binding site, or may serve as one of multiple ribosome binding sites of an mRNA. A polynucleotide containing more than one functional ribosome binding site may encode several peptides or polypeptides that are translated independently by the ribosomes (e.g., multicistronic mRNA). When polynucleotides are provided with an IRES, further optionally provided is a second translatable region. Examples of IRES sequences that can be used according to the present disclosure include without limitation, those from picornaviruses (e.g., FMDV), pest viruses (CFFV), polio viruses (PV), encephalomyocarditis viruses (ECMV), foot- and mouth disease viruses (FMDV), hepatitis C viruses (HCV), classical Swine fever viruses (CSFV), murine leukemia virus (MLV), simian immune deficiency viruses (SIV) or cricket paralysis viruses (CrPV).

### Termination Element

[2617] In some embodiments, the oRNA includes one or more coding regions of interest (i.e., also referred to as product expression sequences) which encode polypeptides of interest, including but not limited to nucleobase editing system and therapeutic proteins. In various embodiments, the product expression sequences may or may not have a termination element.

[2618] In some embodiments, the oRNA includes one or more product expression sequences that lack a termination element, such that the oRNA is continuously translated.

[2619] Exclusion of a termination element may result in rolling circle translation or continuous expression of the encoded peptides or polypeptides as the ribosome will not stall or fall-off. In such an embodiment, rolling circle translation expresses continuously through the product expression sequence.

[2620] In some embodiments, one or more product expression sequences in the oRNA comprise a termination element.

[2621] In some embodiments, not all of the product expression sequences in the oRNA comprise a termination element. In such instances, the product expression sequence may fall off the ribosome when the ribosome encounters the termination element and terminates translation.

### Rolling Circle Translation

[2622] In some embodiments, once translation of the oRNA is initiated, the ribosome bound to the oRNA does not disengage from the oRNA before finishing at least one round of translation of the oRNA. In some embodiments, the oRNA as described herein is competent for rolling circle translation. In some embodiments, during rolling circle translation, once translation of the oRNA is initiated, the ribosome bound to the oRNA does not disengage from the oRNA before finishing at least 2 rounds, at least 3 rounds, at least 4 rounds, at least 5 rounds, at least 6 rounds, at least 7 rounds, at least 8 rounds, at least 9 rounds, at least 10 rounds, at least 11 rounds, at least 12 rounds, at least 13 rounds, at least 14 rounds, at least 15 rounds, at least 20 rounds, at least 30 rounds, at least 40 rounds, at least 50 rounds, at least 60 rounds, at least 70 rounds, at least 80 rounds, at least 90 rounds, at least 100 rounds, at least 150 rounds, at least 200 rounds, at least 250 rounds, at least 500 rounds, at least 1000 rounds, at least 1500 rounds, at least 2000 rounds, at least 5000 rounds, at least 10000 rounds, at least 10⁵ rounds, or at least 10⁶ rounds of translation of the oRNA.

[2623] In some embodiments, the rolling circle translation of the oRNA leads to generation of polypeptide that is translated from more than one round of translation of the oRNA. In some embodiments, the oRNA comprises a stagger element, and rolling circle translation of the oRNA leads to generation of polypeptide product that is generated from a single round of translation or less than a single round of translation of the oRNA.

### Circularization

[2624] In one embodiment, a linear RNA may be cyclized, or concatemerized. In some embodiments, the linear RNA may be cyclized in vitro prior to formulation and/or delivery. In some embodiments, the linear RNA may be cyclized within a cell.

[2625] In some embodiments, the mechanism of cyclization or concatemerization may occur through at least 3 different routes: 1) chemical, 2) enzymatic, and 3) ribozyme catalyzed. The newly formed 5′-/3′-linkage may be intramolecular or intermolecular.

[2626] In the first route, the 5′-end and the 3′-end of the nucleic acid contain chemically reactive groups that, when close together, form a new covalent linkage between the 5′-end and the 3′-end of the molecule. The 5′-end may contain an NHS-ester reactive group and the 3′-end may contain a 3′-amino-terminated nucleotide such that in an organic solvent the 3′-amino-terminated nucleotide on the 3′-end of a synthetic mRNA molecule will undergo a nucleophilic attack on the 5′-NHS-ester moiety forming a new 5′-/3′-amide bond.

[2627] In the second route, T4 RNA ligase may be used to enzymatically link a 5′-phosphorylated nucleic acid molecule to the 3′-hydroxyl group of a nucleic acid forming a new phosphorodiester linkage. In an example reaction, Ag of a nucleic acid molecule is incubated at 37° C. for 1 hour with 1-10 units of T4 RNA ligase (New England Biolabs, Ipswich, MA) according to the manufacturer's protocol. The ligation reaction may occur in the presence of a split oligonucleotide capable of base-pairing with both the 5′- and 3′-region in juxtaposition to assist the enzymatic ligation reaction.

[2628] In the third route, either the 5′- or 3′-end of the cDNA template encodes a ligase ribozyme sequence such that during in vitro transcription, the resultant nucleic acid molecule can contain an active ribozyme sequence capable of ligating the 5′-end of a nucleic acid molecule to the 3′-end of a nucleic acid molecule. The ligase ribozyme may be derived from the Group I Intron, Group I Intron, Hepatitis Delta Virus, Hairpin ribozyme or may be selected by SELEX (systematic evolution of ligands by exponential enrichment). The ribozyme ligase reaction may take 1 to 24 hours at temperatures between 0 and 37° C.

[2629] In some embodiments, the oRNA is made via circularization of a linear RNA.

[2630] In some embodiments, the following elements are operably connected to each other and, in some embodiments, arranged in the following sequence: a.) a 5′ homology arm, b.) a 3′ group I intron fragment containing a 3′ splice site dinucleotide, c.) a protein coding or noncoding region, d.) a 5′ group I intron fragment containing a 5′ splice site dinucleotide, and e.) a 3′ homology arm. In certain embodiments said vector allows production of a circular RNA that is translatable and/or biologically active inside eukaryotic cells. In some embodiments, the biologically active RNA is, for example, an miRNA sponge, or long noncoding RNA.

[2631] In some embodiments, the following elements are operably connected to each other and arranged in the following sequence: a.) a 5′ homology arm, b.) a 3′ group I intron fragment containing a 3′ splice site dinucleotide, c.) optionally, a 5′ spacer sequence, d.) optionally, an internal ribosome entry site (IRES), e.) a protein coding or noncoding region, f.) optionally, a 3′ spacer sequence, g.) a 5′ group I intron fragment containing a 5′ splice site dinucleotide, and h.) a 3′ homology arm. In certain embodiments, said vector allows production of a circular RNA that is translatable and/or biologically active inside eukaryotic cells.

[2632] In some embodiments, the following elements are operably connected to each other and arranged in the following sequence: a.) a 5′ homology arm, b.) a 3′ group I intron fragment containing a 3′ splice site dinucleotide, c.) a 5′ spacer sequence, d.) an internal ribosome entry site (IRES), e.) a protein coding or noncoding region, f.) a 5′ group I intron fragment containing a 5′ splice site dinucleotide, and g.) a 3′ homology arm. In some embodiments, said vector allows production of a circular RNA that is translatable and/or biologically active inside eukaryotic cells.

[2633] In some embodiments, the following elements are operably connected to each other and arranged in the following sequence: a.) a 5′ homology arm, b.) a 3′ group I intron fragment containing a 3′ splice site dinucleotide, c.) a 5′ spacer sequence, d.) a protein coding or noncoding region, e.) a 3′ spacer sequence, f.) a 5′ group I intron fragment containing a 5′ splice site dinucleotide, and g.) a 3′ homology arm. In some embodiments, said vector allows production of a circular RNA that is translatable and/or biologically active inside eukaryotic cells.

[2634] In some embodiments, the following elements are operably connected to each other and arranged in the following sequence: a.) a 5′ homology arm, b.) a 3′ group I intron fragment containing a 3′ splice site dinucleotide, c.) an internal ribosome entry site (IRES), d.) a protein coding or noncoding region, e.) a 3′ spacer sequence, f) a 5′ group I intron fragment containing a 5′ splice site dinucleotide, and g.) a 3′ homology arm. In some embodiments, said vector allows production of a circular RNA that is translatable and/or biologically active inside eukaryotic cells.

[2635] In some embodiments, the following elements are operably connected to each other and arranged in the following sequence: a.) a 5′ homology arm, b.) a 3′ group I intron fragment containing a 3′ splice site dinucleotide, c.) a protein coding or noncoding region, d.) a 3′ spacer sequence, e.) a 5′ group I intron fragment containing a 5′ splice site dinucleotide, and f.) a 3′ homology arm. In some embodiments, said vector allows production of a circular RNA that is translatable and/or biologically active inside eukaryotic cells.

[2636] In some embodiments, the following elements are operably connected to each other and arranged in the following sequence: a.) a 5′ homology arm, b.) a 3′ group I intron fragment containing a 3′ splice site dinucleotide, c.) a 5′ spacer sequence, d.) a protein coding or noncoding region, e.) a 5′ group I intron fragment containing a 5′ splice site dinucleotide, and f.) a 3′ homology arm. In some embodiments, said vector allows production of a circular RNA that is translatable and/or biologically active inside eukaryotic cells.

[2637] In some embodiments, the following elements are operably connected to each other and arranged in the following sequence: a.) a 5′ homology arm, b.) a 3′ group I intron fragment containing a 3′ splice site dinucleotide, c.) an internal ribosome entry site (IRES), d.) a protein coding or noncoding region, e.) a 5′ group I intron fragment containing a 5′ splice site dinucleotide, and f) a 3′ homology arm. In some embodiments, said vector allows production of a circular RNA that is translatable and/or biologically active inside eukaryotic cells.

[2638] In some embodiments, the following elements are operably connected to each other and arranged in the following sequence: a.) a 5′ homology arm, b.) a 3′ group I intron fragment containing a 3′ splice site dinucleotide, c.) a 5′ spacer sequence, d.) an internal ribosome entry site (IRES), e.) a protein coding or noncoding region, f) a 3′ spacer sequence, g.) a 5′ group I intron fragment containing a 5′ splice site dinucleotide, and h.) a 3′ homology arm. In some embodiments, said vector allowing production of a circular RNA that is translatable and/or biologically active inside eukaryotic cells.

[2639] In one embodiment, the 3′ group I intron fragment and/or the 5′ group I intron fragment is from a Cyanobacterium Anabaena sp. pre-tRNA-Leu gene or T4 phage Td gene.

[2640] In one embodiment, the 3′ group I intron fragment and/or the 5′ group I intron fragment is from a Cyanobacterium Anabaena sp. pre-tRNA-Leu gene.

[2641] In one embodiment, the protein coding region encodes a protein of eukaryotic or prokaryotic origin. In another embodiment, the protein coding region encodes human protein or non-human protein. In some embodiments, the protein coding region encodes one or more antibodies. For example, in some embodiments, the protein coding region encodes human antibodies. In one embodiment, the protein coding region encodes a protein selected from hFIX, SP-B, VEGF-A, human methylmalonyl-CoA mutase (hMUT), CFTR, cancer self-antigens, and additional gene editing enzymes like Cpfl, zinc finger nucleases (ZFNs) and transcription activator-like effector nucleases (TALENs). In another embodiment, the protein coding region encodes a protein for therapeutic use. In one embodiment, the human antibody encoded by the protein coding region is an anti-HIV antibody. In one embodiment, the antibody encoded by the protein coding region is a bispecific antibody. In one embodiment, the bispecific antibody is specific for CD19 and CD22. In another embodiment, the bispecific antibody is specific for CD3 and CLDN6. In one embodiment, the protein coding region encodes a protein for diagnostic use. In one embodiment, the protein coding region encodes Gaussia luciferase (Gluc), Firefly luciferase (Fluc), enhanced green fluorescent protein (eGFP), human erythropoietin (hEPO), or Cas9 endonuclease.

[2642] In one embodiment, the 5′ homology arm is about 5-50 nucleotides in length. In another embodiment, the 5′ homology arm is about 9-19 nucleotides in length. In some embodiments, the 5′ homology arm is at least 5, 6, 7, 8, 9, 10, 11, 12, 13, 14, 15, 16, 17, 18 or 19 nucleotides in length. In some embodiments, the 5′ homology arm is no more than 50, 45, 40, 35, 30, 25 or 20 nucleotides in length. In some embodiments, the 5′ homology arm is 5, 6, 7, 8, 9, 10, 11, 12, 13, 14, 15, 16, 17, 18 or 19 nucleotides in length.

[2643] In one embodiment, the 3′ homology arm is about 5-50 nucleotides in length. In another embodiment, the 3′ homology arm is about 9-19 nucleotides in length. In some embodiments, the 3′ homology arm is at least 5, 6, 7, 8, 9, 10, 11, 12, 13, 14, 15, 16, 17, 18 or 19 nucleotides in length. In some embodiments, the 3′ homology arm is no more than 50, 45, 40, 35, 30, 25 or 20 nucleotides in length. In some embodiments, the 3′ homology arm is 5, 6, 7, 8, 9, 10, 11, 12, 13, 14, 15, 16, 17, 18 or 19 nucleotides in length.

[2644] In one embodiment, the 5′ spacer sequence is at least 10 nucleotides in length. In another embodiment, the 5′ spacer sequence is at least 15 nucleotides in length. In a further embodiment, the 5′ spacer sequence is at least 30 nucleotides in length. In some embodiments, the 5′ spacer sequence is at least 7, 8, 9, 10, 11, 12, 13, 14, 15, 16, 17, 18, 19, 20, 25 or 30 nucleotides in length. In some embodiments, the 5′ spacer sequence is no more than 100, 90, 80, 70, 60, 50, 45, 40, 35 or 30 nucleotides in length. In some embodiments the 5′ spacer sequence is between 20 and 50 nucleotides in length. In certain embodiments, the 5′ spacer sequence is 10, 11, 12, 13, 14, 15, 16, 17, 18, 19, 20, 21, 22, 23, 24, 25, 26, 27, 28, 29, 30, 31, 32, 33, 34, 35, 36, 37, 38, 39, 40, 41, 42, 43, 44, 45, 46, 47, 48, 49 or 50 nucleotides in length. In one embodiment, the 5′ spacer sequence is a polyA sequence. In another embodiment, the 5′ spacer sequence is a polyA-C sequence.

[2645] In one embodiment, the 3′ spacer sequence is at least 10 nucleotides in length. In another embodiment, the 3′ spacer sequence is at least 15 nucleotides in length. In a further embodiment, the 3′ spacer sequence is at least 30 nucleotides in length. In some embodiments, the 3′ spacer sequence is at least 7, 8, 9, 10, 11, 12, 13, 14, 15, 16, 17, 18, 19, 20, 25 or 30 nucleotides in length. In some embodiments, the 3′ spacer sequence is no more than 100, 90, 80, 70, 60, 50, 45, 40, 35 or 30 nucleotides in length. In some embodiments the 3′ spacer sequence is between 20 and 50 nucleotides in length. In certain embodiments, the 3′ spacer sequence is 10, 11, 12, 13, 14, 15, 16, 17, 18, 19, 20, 21, 22, 23, 24, 25, 26, 27, 28, 29, 30, 31, 32, 33, 34, 35, 36, 37, 38, 39, 40, 41, 42, 43, 44, 45, 46, 47, 48, 49 or 50 nucleotides in length. In one embodiment, the 3′ spacer sequence is a polyA sequence. In another embodiment, the 5′ spacer sequence is a polyA-C sequence.

### Extracellular Circularization

[2646] In some embodiments, the linear RNA is cyclized, or concatemerized using a chemical method to form an oRNA. In some chemical methods, the 5′-end and the 3′-end of the nucleic acid (e.g., a linear RNA) includes chemically reactive groups that, when close together, may form a new covalent linkage between the 5′-end and the 3′-end of the molecule. The 5′-end may contain an NHS-ester reactive group and the 3′-end may contain a 3′-amino-terminated nucleotide such that in an organic solvent the 3′-amino-terminated nucleotide on the 3′-end of a linear RNA will undergo a nucleophilic attack on the 5′-NHS-ester moiety forming a new 5′-/3′-amide bond.

[2647] In one embodiment, a DNA or RNA ligase may be used to enzymatically link a 5′-phosphorylated nucleic acid molecule (e.g., a linear RNA) to the 3′-hydroxyl group of a nucleic acid (e.g., a linear nucleic acid) forming a new phosphorodiester linkage. In an example reaction, a linear RNA is incubated at 37 C for 1 hour with 1-10 units of T4 RNA ligase according to the manufacturer's protocol. The ligation reaction may occur in the presence of a linear nucleic acid capable of base-pairing with both the 5′- and 3′-region in juxtaposition to assist the enzymatic ligation reaction. In one embodiment, the ligation is splint ligation where a single stranded polynucleotide (splint), like a single stranded RNA, can be designed to hybridize with both termini of a linear RNA, so that the two termini can be juxtaposed upon hybridization with the single-stranded splint. Splint ligase can thus catalyze the ligation of the juxtaposed two termini of the linear RNA, generating an oRNA.

[2648] In one embodiment, a DNA or RNA ligase may be used in the synthesis of the oRNA. As a non-limiting example, the ligase may be a circ ligase or circular ligase.

[2649] In one embodiment, either the 5′- or 3′-end of the linear RNA can encode a ligase ribozyme sequence such that during in vitro transcription, the resultant linear RNA includes an active ribozyme sequence capable of ligating the 5′-end of the linear RNA to the 3′-end of the linear RNA. The ligase ribozyme may be derived from the Group I Intron, Hepatitis Delta Virus, Hairpin ribozyme or may be selected by SELEX (systematic evolution of ligands by exponential enrichment).

[2650] In one embodiment, a linear RNA may be cyclized or concatemerized by using at least one non-nucleic acid moiety. In one aspect, the at least one non-nucleic acid moiety may react with regions or features near the 5′ terminus and/or near the 3′ terminus of the linear RNA in order to cyclize or concatermerize the linear RNA. In another aspect, the at least one non-nucleic acid moiety may be located in or linked to or near the 5′ terminus and/or the 3′ terminus of the linear RNA. The non-nucleic acid moieties contemplated may be homologous or heterologous. As a non-limiting example, the non-nucleic acid moiety may be a linkage such as a hydrophobic linkage, ionic linkage, a biodegradable linkage and/or a cleavable linkage. As another non-limiting example, the non-nucleic acid moiety is a ligation moiety. As yet another non-limiting example, the non-nucleic acid moiety may be an oligonucleotide or a peptide moiety, such as an aptamer or a non-nucleic acid linker as described herein.

[2651] In one embodiment, a linear RNA may be cyclized or concatemerized due to a non-nucleic acid moiety that causes an attraction between atoms, molecular surfaces at, near or linked to the 5′ and 3′ ends of the linear RNA. As a non-limiting example, one or more linear RNA may be cyclized or concatemerized by intermolecular forces or intramolecular forces. Non-limiting examples of intermolecular forces include dipole-dipole forces, dipole-induced dipole forces, induced dipole-induced dipole forces, Van der Waals forces, and London dispersion forces. Non-limiting examples of intramolecular forces include covalent bonds, metallic bonds, ionic bonds, resonant bonds, agnostic bonds, dipolar bonds, conjugation, hyperconjugation and antibonding.

[2652] In one embodiment, the linear RNA may comprise a ribozyme RNA sequence near the 5′ terminus and near the 3′ terminus. The ribozyme RNA sequence may covalently link to a peptide when the sequence is exposed to the remainder of the ribozyme. In one aspect, the peptides covalently linked to the ribozyme RNA sequence near the 5′ terminus and the 3′ terminus may associate with each other causing a linear RNA to cyclize or concatemerize. In another aspect, the peptides covalently linked to the ribozyme RNA near the 5′ terminus and the 3′ terminus may cause the linear RNA to cyclize or concatemerize after being subjected to ligated using various methods known in the art such as, but not limited to, protein ligation.

[2653] In some embodiments, the linear RNA may include a 5′ triphosphate of the nucleic acid converted into a 5′ monophosphate, e.g., by contacting the 5′ triphosphate with RNA 5′ pyrophosphohydrolase (RppH) or an ATP diphosphohydrolase (apyrase). Alternately, converting the 5′ triphosphate of the linear RNA into a 5′ monophosphate may occur by a two-step reaction comprising: (a) contacting the 5′ nucleotide of the linear RNA with a phosphatase (e.g., Antarctic Phosphatase, Shrimp Alkaline Phosphatase, or Calf Intestinal Phosphatase) to remove all three phosphates; and (b) contacting the 5′ nucleotide after step (a) with a kinase (e.g., Polynucleotide Kinase) that adds a single phosphate.

[2654] In some embodiments, RNA may be circularized using the methods described in WO2017222911 and WO2016197121, the contents of each of which are herein incorporated by reference in their entirety.

[2655] In some embodiments, RNA may be circularized, for example, by back splicing of a non-mammalian exogenous intron or splint ligation of the 5′ and 3′ ends of a linear RNA. In one embodiment, the circular RNA is produced from a recombinant nucleic acid encoding the target RNA to be made circular. As a non-limiting example, the method comprises: a) producing a recombinant nucleic acid encoding the target RNA to be made circular, wherein the recombinant nucleic acid comprises in 5’ to 3 ‘ order: i) a 3’ portion of an exogenous intron comprising a 3′ splice site, ii) a nucleic acid sequence encoding the target RNA, and iii) a 5 ‘ portion of an exogenous intron comprising a 5’ splice site; b) performing transcription, whereby RNA is produced from the recombinant nucleic acid; and c) performing splicing of the RNA, whereby the RNA circularizes to produce a oRNA.

[2656] While not wishing to be bound by theory, circular RNAs generated with exogenous introns are recognized by the immune system as “non-self” and trigger an innate immune response. On the other hand, circular RNAs generated with endogenous introns are recognized by the immune system as “self” and generally do not provoke an innate immune response, even if carrying an exon comprising foreign RNA.

[2657] Accordingly, circular RNAs can be generated with either an endogenous or exogenous intron to control immunological self/non-self discrimination as desired. Numerous intron sequences from a wide variety of organisms and viruses are known and include sequences derived from genes encoding proteins, ribosomal RNA (rRNA), or transfer RNA (tRNA).

[2658] Circular RNAs can be produced from linear RNAs in a number of ways. In some embodiments, circular RNAs are produced from a linear RNA by backsplicing of a downstream 5′ splice site (splice donor) to an upstream 3′ splice site (splice acceptor). Circular RNAs can be generated in this manner by any nonmammalian splicing method. For example, linear RNAs containing various types of introns, including self-splicing group I introns, self-splicing group II introns, spliceosomal introns, and tRNA introns can be circularized. In particular, group I and group II introns have the advantage that they can be readily used for production of circular RNAs in vitro as well as in vivo because of their ability to undergo self-splicing due to their autocatalytic ribozyme activity.

[2659] In some embodiments, circular RNAs can be produced in vitro from a linear RNA by chemical or enzymatic ligation of the 5′ and 3′ ends of the RNA. Chemical ligation can be performed, for example, using cyanogen bromide (BrCN) or ethyl-3-(3′-dimethylaminopropyl) carbodiimide (EDC) for activation of a nucleotide phosphomonoester group to allow phosphodiester bond formation. See e.g., Sokolova (1988) FEBS Lett 232: 153-155; Dolinnaya et al. (1991) Nucleic Acids Res., 19:3067-3072; Fedorova (1996) Nucleosides Nucleotides Nucleic Acids 15: 1 137-1 147; herein incorporated by reference. Alternatively, enzymatic ligation can be used to circularize RNA. Exemplary ligases that can be used include T4 DNA ligase (T4 Dnl), T4 RNA ligase 1 (T4 Rnl 1), and T4 RNA ligase 2 (T4 Rnl 2).

[2660] In some embodiments, splint ligation using an oligonucleotide splint that hybridizes with the two ends of a linear RNA can be used to bring the ends of the linear RNA together for ligation. Hybridization of the splint, which can be either a DNA or a RNA, orientates the 5′-phosphate and 3′-OH of the RNA ends for ligation. Subsequent ligation can be performed using either chemical or enzymatic techniques, as described above. Enzymatic ligation can be performed, for example, with T4 DNA ligase (DNA splint required), T4 RNA ligase 1 (RNA splint required) or T4 RNA ligase 2 (DNA or RNA splint). Chemical ligation, such as with BrCN or EDC, in some cases is more efficient than enzymatic ligation if the structure of the hybridized splint-RNA complex interferes with enzymatic activity.

[2661] In some embodiments, the oRNA may further comprise an internal ribosome entry site (IBES) operably linked to an RNA sequence encoding a polypeptide. Inclusion of an IBES permits the translation of one or more open reading frames from a circular RNA. The IBES element attracts a eukaryotic ribosomal translation initiation complex and promotes translation initiation. See, e.g., Kaufman et al., Nuc. Acids Res. (1991) 19:4485-4490; Gurtu et al., Biochem. Biophys. Res. Comm. (1996) 229:295-298; Rees et al., BioTechniques (1996) 20: 102-110; Kobayashi et al., BioTechniques (1996) 21:399-402; and Mosser et al., BioTechniques 1997 22 150-161).

[2662] In some embodiments, the circularization efficiency of the circularization methods provided herein is at least about 10%, at least about 15%, at least about 20%, at least about 25%, at least about 30%, at least about 35%, at least about 40%, at least about 45%, at least about 50%, at least about 60%, at least about 70%, at least about 80%, at least about 90%, at least about 95%, or 100%. In some embodiments, the circularization efficiency of the circularization methods provided herein is at least about 40%.

### Splicing Element

[2663] In some embodiments, the oRNA includes at least one splicing element. The splicing element can be a complete splicing element that can mediate splicing of the oRNA or the spicing element can be a residual splicing element from a completed splicing event. For instance, in some cases, a splicing element of a linear RNA can mediate a splicing event that results in circularization of the linear RNA, thereby the resultant oRNA comprises a residual splicing element from such splicing-mediated circularization event. In some cases, the residual splicing element is not able to mediate any splicing. In other cases, the residual splicing element can still mediate splicing under certain circumstances. In some embodiments, the splicing element is adjacent to at least one expression sequence. In some embodiments, the oRNA includes a splicing element adjacent each expression sequence. In some embodiments, the splicing element is on one or both sides of each expression sequence, leading to separation of the expression products, e.g., peptide(s) and or polypeptide(s).

[2664] In some embodiments, the oRNA includes an internal splicing element that when replicated the spliced ends are joined together. Some examples may include miniature introns (<100 nt) with splice site sequences and short inverted repeats (30-40 nt) such as AluSq2, AluJr, and AluSz, inverted sequences in flanking introns, Alu elements in flanking introns, and motifs found in (suptable4 enriched motifs) cis-sequence elements proximal to backsplice events such as sequences in the 200 bp preceding (upstream of) or following (downstream from) a backsplice site with flanking exons. In some embodiments, the oRNA includes at least one repetitive nucleotide sequence described elsewhere herein as an internal splicing element. In such embodiments, the repetitive nucleotide sequence may include repeated sequences from the Alu family of introns. See, e.g., U.S. Pat. No. 11,058,706.

[2665] In some embodiments, the oRNA may include canonical splice sites that flank head-to-tail junctions of the oRNA.

[2666] In some embodiments, the oRNA may include a bulge-helix-bulge motif, comprising a 4-base pair stem flanked by two 3-nucleotide bulges. Cleavage occurs at a site in the bulge region, generating characteristic fragments with terminal 5′-hydroxyl group and 2′, 3′-cyclic phosphate. Circularization proceeds by nucleophilic attack of the 5′-OH group onto the 2′, 3′-cyclic phosphate of the same molecule forming a 3′, 5′-phosphodiester bridge.

[2667] In some embodiments, the oRNA may include a sequence that mediates self-ligation.

[2668] Non-limiting examples of sequences that can mediate self-ligation include a self-circularizing intron, e.g., a 5′ and 3′ slice junction, or a self-circularizing catalytic intron such as a Group I, Group II or Group III Introns. Non-limiting examples of group I intron self-splicing sequences may includeself-splicing permuted intron-exon sequences derived from T4 bacteriophage gene td, and the intervening sequence (IVS) rRNA of Tetrahymena.

### Other Circularization Methods

[2669] In some embodiments, linear RNA may include complementary sequences, including either repetitive or nonrepetitive nucleic acid sequences within individual introns or across flanking introns. In some embodiments, the oRNA includes a repetitive nucleic acid sequence. In some embodiments, the repetitive nucleotide sequence includes poly CA or poly UG sequences. In some embodiments, the oRNA includes at least one repetitive nucleic acid sequence that hybridizes to a complementary repetitive nucleic acid sequence in another segment of the oRNA, with the hybridized segment forming an internal double strand. In some embodiments, repetitive nucleic acid sequences and complementary repetitive nucleic acid sequences from two separate oRNA that hybridize to generate a single oRNA, with the hybridized segments forming internal double strands. In some embodiments, the complementary sequences are found at the 5′ and 3′ ends of the linear RNA. In some embodiments, the complementary sequences include about 3, 4, 5, 6, 7, 8, 9, 10, 11, 12, 13, 14, 15, 16, 17, 18, 19, 20, 21, 22, 23, 24, 25, 26, 27, 28, 29, 30, 35, 40, 45, 50, 55, 60, 65, 70, 75, 80, 85, 90, 95, 100, or more paired nucleotides.

[2670] In some embodiments, chemical methods of circularization may be used to generate the oRNA. Such methods may include, but are not limited to click chemistry (e.g., alkyne- and azide-based methods, or clickable bases), olefin metathesis, phosphoramidate ligation, hemiaminal-imine crosslinking, base modification, and any combination thereof. In some embodiments, enzymatic methods of circularization may be used to generate the oRNA. In some embodiments, a ligation enzyme, e.g., DNA or RNA ligase, may be used to generate a template of the oRNA or complement, a complementary strand of the oRNA, or the oRNA.

[2671] Any of the circular polynucleotides as taught in for example U.S. Provisional Application No. 61/873,010 filed Sep. 3, 2013 or U.S. Pat. No. 10,709,779, may be used herein. The contents of these references are incorporated herein by reference in their entirety. In addition, any of the circular RNAs, methods for making circular RNAs, circular RNA compositions that are described in the following publications are contemplated herein and are incorporated by reference in their entireties are part of the instant specification: U.S. Pat. Nos. 11,352,640, 11,352,641, 11,203,767, US U.S. Pat. Nos. 5,773,244, and 5,766,903; US Application Publications US 2022/0177540, US 2021/0371494, US 2022/0090137, US 2019/0345503, and US 2015/0299702; and PCT Application Publications WO 2021/226597, WO 2019/236673, WO 2017/222911, WO2016/187583, WO2014/082644 and WO 1997/007825.

### H. Pharmaceutical Compositions

[2672] The present disclosure relates to pharmaceutical compositions comprising novel Cas12a (or Cas Type V) editing systems. In some embodiments, the Cas12a (or Cas Type V) editing system comprising one or more polypeptides and cognate guide RNA are formulated as part of a lipid nanoparticle. In some embodiments, a lipid nanoparticle comprises an ionizable lipid, a structural lipid, a PEGylated lipid, and a phospholipid.

[2673] In various aspects of the invention, the Cas12a (or Cas Type V) genome editing system is delivered as polynucleotides. For instance, in one embodiment, the Cas12a (or Cas Type V) nuclease and the gRNA are delivered as polynucleotides and encoded by one or more plasmids (Lauritsen, I., Porse, A., Sommer, M. O. A. et al. A versatile one-step CRISPR-Cas9 based approach to plasmid-curing. Microb Cell Fact 16, 135 (2017). https://doi.org/10.1186/s12934-017-0748-z; Wasels, Francois et al. “A two-plasmid inducible CRISPR/Cas9 genome editing tool for Clostridium acetobutylicum.” Journal of microbiological methods vol. 140 (2017): 5-11) doi:10.1016/j.mimet.2017.06.010). In other embodiments, the Cas12a nuclease is encoded in a mRNA and the gRNA is encoded as an in vitro transcribed synthetic oligonucleotide (Yang, Hui et al. “One-step generation of mice carrying reporter and conditional alleles by CRISPR/Cas-mediated genome engineering.” Cell vol. 154, 6 (2013): 1370-9. doi:10.1016/j.cell.2013.08.022). In other aspects, the Cas12a nuclease protein and a synthetic gRNA oligonucleotide (Suresh, Bharathi et al. “Cell-Penetrating Peptide-Mediated Delivery of Cas9 Protein and Guide RNA for Genome Editing.” Methods in molecular biology (Clifton, N.J.) vol. 1507 (2017): 81-94. doi:10.1007/978-1-4939-6518-2_7) or alternatively as an Cas12a nuclease protein gRNA RNP complex (Gasiunas, Giedrius et al. “Cas9-crRNA ribonucleoprotein complex mediates specific DNA cleavage for adaptive immunity in bacteria.” Proceedings of the National Academy of Sciences of the United States of America vol. 109, 39 (2012): E2579-86. doi:10.1073/pnas.1208507109).

[2674] The pharmaceutical compositions described herein (e.g., LNP compositions comprising a Cas12a gene editing system or components thereof) may be delivered as described in PCT Publication WO2012135805, which is incorporated herein by reference in its entirety, or by another method known or described herein.

[2675] In various aspects, the present disclosure provides methods comprising administering a pharmaceutical composition (e.g., LNP formulation comprising a Cas12a gene editing system) to a subject in need thereof. The pharmaceutical composition may be administered to a subject using any amount and any route of administration which may be effective for preventing, treating, diagnosing, or imaging a disease, disorder, and/or condition. The exact amount required will vary from subject to subject, depending on factors such as, but not limited to, the species, age, and general condition of the subject, the severity of the disease, the particular composition, its mode of administration, its mode of activity, and the like. The pharmaceutical composition may be administered to animals, such as mammals (e.g., humans, domesticated animals, cats, dogs, monkeys, mice, rats, etc.). The payload of the pharmaceutical composition is a polynucleotide.

[2676] In some embodiments, pharmaceutical, prophylactic, diagnostic, or imaging compositions thereof are administered to humans.

[2677] In some embodiments, the herein disclosed pharmaceutical compositions (e.g., LNPs comprising a Cas12a (or Cas Type V) gene editing system) are administered by one or more of a variety of routes, including, but not limited to, local, oral, intravenous, intramuscular, intra-arterial, intramedullary, intrathecal, subcutaneous, intraventricular, transdermal, interdermal, rectal, intravaginal, intraperitoneal, topical (e.g., by powders, ointments, creams, gels, lotions, and/or drops), mucosal, nasal, buccal, enteral, vitreal, intratumoral, sublingual; by intratracheal instillation, bronchial instillation, and/or inhalation; as an oral spray, nasal spray, and/or aerosol, and/or through a portal vein catheter.

[2678] In some embodiments, the herein disclosed pharmaceutical compositions (e.g., LNPs comprising a Cas12a (or Cas Type V) gene editing system) are administered by systemic intravenous injection.

[2679] In some embodiments, the herein disclosed pharmaceutical compositions (e.g., LNPs comprising a Cas12a (or Cas Type V) gene editing system) are administered intravenously and/or orally. Solid dosage forms for oral administration include capsules, tablets, pills, powders, and granules. In such solid dosage forms, an active ingredient is mixed with at least one inert, pharmaceutically acceptable excipient such as sodium citrate or dicalcium phosphate and/or fillers or extenders (e.g. starches, lactose, sucrose, glucose, mannitol, and silicic acid), binders (e.g. carboxymethylcellulose, alginates, gelatin, polyvinylpyrrolidinone, sucrose, and acacia), humectants (e.g. glycerol), disintegrating agents (e.g. agar, calcium carbonate, potato or tapioca starch, alginic acid, certain silicates, and sodium carbonate), solution retarding agents (e.g. paraffin), absorption accelerators (e.g. quaternary ammonium compounds), wetting agents (e.g. cetyl alcohol and glycerol monostearate), absorbents (e.g. kaolin and bentonite clay), and lubricants (e.g. talc, calcium stearate, magnesium stearate, solid polyethylene glycols, sodium lauryl sulfate), and mixtures thereof. In the case of capsules, tablets and pills, the dosage form may comprise buffering agents.

[2680] In specific embodiments, the herein disclosed pharmaceutical compositions (e.g., LNPs comprising a Cas12a gene editing system) may be administered in a way which allows the genome editing system to cross the blood-brain barrier, vascular barrier, or other epithelial barrier.

[2681] Injectable preparations, for example, sterile injectable aqueous or oleaginous suspensions may be formulated according to the known art using suitable dispersing agents, wetting agents, and/or suspending agents. Sterile injectable preparations may be sterile injectable solutions, suspensions, and/or emulsions in nontoxic parenterally acceptable diluents and/or solvents, for example, as a solution in 1,3-butanediol. Among the acceptable vehicles and solvents that may be employed are water, Ringer's solution, U.S.P., and isotonic sodium chloride solution. Sterile, fixed oils are conventionally employed as a solvent or suspending medium. For this purpose, any bland fixed oil can be employed including synthetic mono- or diglycerides. Fatty acids such as oleic acid can be used in the preparation of injectables.

[2682] Injectable formulations can be sterilized, for example, by filtration through a bacterial-retaining filter, and/or by incorporating sterilizing agents in the form of sterile solid compositions which can be dissolved or dispersed in sterile water or other sterile injectable medium prior to use.

[2683] Dosage forms for local, topical and/or transdermal administration of a pharmaceutical composition may include ointments, pastes, creams, lotions, gels, powders, solutions, sprays, inhalants and/or patches. Additionally, the present disclosure contemplates the use of transdermal patches, which often have the added advantage of providing controlled delivery of a compound to the body. Such dosage forms may be prepared, for example, by dissolving and/or dispensing the compound in the proper medium. Alternatively or additionally, rate may be controlled by either providing a rate controlling membrane and/or by dispersing the compound in a polymer matrix and/or gel.

[2684] Formulations suitable for topical administration include, but are not limited to, liquid and/or semi liquid preparations such as liniments, lotions, oil in water and/or water in oil emulsions such as creams, ointments and/or pastes, and/or solutions and/or suspensions.

[2685] Topically-administrable formulations may, for example, comprise from about 1% to about 10% (w/w) active ingredient, although the concentration of active ingredient may be as high as the solubility limit of the active ingredient in the solvent. Formulations for topical administration may further comprise one or more of the additional ingredients described herein.

[2686] A pharmaceutical composition may be prepared, packaged, and/or sold in a formulation suitable for ophthalmic administration. Such formulations may, for example, be in the form of eye drops including, for example, a 0.1/1.0% (w/w) solution and/or suspension of the active ingredient in an aqueous or oily liquid excipient. Such drops may further comprise buffering agents, salts, and/or one or more other of any additional ingredients described herein. Other opthalmically-administrable formulations which are useful include those which comprise the active ingredient in microcrystalline form and/or in a liposomal preparation. Ear drops and/or eye drops are contemplated as being within the scope of this disclosure.

[2687] In general, the most appropriate route of administration will depend upon a variety of factors including the nature of the genome editing system to be delivered (e.g., its stability in the environment of the gastrointestinal tract, bloodstream, etc), the condition of the patient (e.g., whether the patient is able to tolerate particular routes of administration), etc. The present disclosure encompasses the delivery of the genome editing system by any appropriate route taking into consideration likely advances in the sciences of drug delivery. In certain embodiments, pharmaceutical compositions in accordance with the present disclosure may be administered at dosage levels sufficient to deliver from about 0.0001 mg/kg to about 100 mg/kg, from about 0.01 mg/kg to about 50 mg/kg, from about 0.1 mg/kg to about 40 mg/kg, from about 0.5 mg/kg to about 30 mg/kg, from about 0.01 mg/kg to about 10 mg/kg, from about 0.1 mg/kg to about 10 mg/kg, or from about 1 mg/kg to about 25 mg/kg, of subject body weight per day, one or more times a day, to obtain the desired therapeutic, diagnostic or prophylactic effect. The desired dosage may be delivered three times a day, two times a day, once a day, every other day, every third day, every week, every two weeks, every three weeks, or every four weeks. In certain embodiments, the desired dosage may be delivered using multiple administrations (e.g., two, three, four, five, six, seven, eight, nine, ten, eleven, twelve, thirteen, fourteen, or more administrations). When multiple administration is employed, split dosing regimens such as those described herein may be used.

[2688] According to the present disclosure, administration of the genome editing system in split-dose regimens may produce higher levels of proteins in mammalian subjects. As used herein, a “split dose” is the division of single unit dose or total daily dose into two or more doses. As used herein, a “single unit dose” is a dose of any therapeutic administered in one dose/at one time/single route/single point of contact, i.e., single administration event. As used herein, a “total daily dose” is an amount given or prescribed in 24 hr period. It may be administered as a single unit dose. In one embodiment, the genome editing system of the present disclosure are administered to a subject in split doses. In some embodiments, the genome editing system is formulated in buffer only or in a formulation described herein.

[2689] The herein disclosed pharmaceutical compositions (e.g., LNPs comprising a Cas12a gene editing system) of the present disclosure may be used or administered in combination with one or more other therapeutic, prophylactic, diagnostic, or imaging agents. By “in combination with,” it is not intended to imply that the agents must be administered at the same time and/or formulated for delivery together, although these methods of delivery are within the scope of the present disclosure. Pharmaceutical compositions can be administered concurrently with, prior to, or subsequent to, one or more other desired therapeutics or medical procedures. In general, each agent will be administered at a dose and/or on a time schedule determined for that agent. In some embodiments, the present disclosure encompasses the delivery of pharmaceutical, prophylactic, diagnostic, or imaging compositions in combination with agents that may improve their bioavailability, reduce and/or modify their metabolism, inhibit their excretion, and/or modify their distribution within the body.

[2690] It will further be appreciated that therapeutically, prophylactically, diagnostically, or imaging active agents utilized in combination may be administered together in a single pharmaceutical composition or administered separately in different pharmaceutical compositions. In general, it is expected that agents utilized in combination with be utilized at levels that do not exceed the levels at which they are utilized individually. In some embodiments, the levels utilized in combination will be lower than those utilized individually. In one embodiment, the combinations, each or together may be administered according to the split dosing regimens described herein.

[2691] The particular combination of therapies (therapeutics or procedures) to employ in a combination regimen will take into account compatibility of the desired therapeutics and/or procedures and the desired therapeutic effect to be achieved. It will also be appreciated that the therapies employed may achieve a desired effect for the same disorder (for example, a pharmaceutical composition useful for treating cancer in accordance with the present disclosure may be administered concurrently with a chemotherapeutic agent), or they may achieve different effects (e.g., control of any adverse effects).

[2692] Pharmaceutical compositions containing LNPs disclosed herein are formulated for administration intramuscularly, transarterially, intraocularly, vaginally, rectally, intraperitoneally, intravenously, intranasally, subcutaneously, endoscopically, transdermally, intramuscularly, intraventricularly, intradermally, intrathecally, topically (e.g. by powders, ointments, creams, gels, lotions, and/or drops), mucosally, nasal, enterally, intratumorally, by intratracheal instillation, bronchial instillation, and/or inhalation; nasal spray and/or aerosol, and/or through a portal vein catheter.

[2693] The pharmaceutical compositions may also be formulated for direct delivery to an organ or tissue in any of several ways in the art including, but not limited to, direct soaking or bathing, via a catheter, by gels, powder, ointments, creams, gels, lotions, and/or drops, by using substrates such as fabric or biodegradable materials coated or impregnated with the pharmaceutical compositions, and the like. In some embodiments, the pharmaceutical composition is formulated for extended release. In specific embodiments, the genome editing systems of the present disclosure and/or pharmaceutical, prophylactic, diagnostic, or imaging compositions thereof, may be administered in a way which allows the genome editing system to cross the blood-brain barrier, vascular barrier, or other epithelial barrier.

[2694] In some aspects of the present disclosure, the genome editing system of the present disclosure are spatially retained within or proximal to a target tissue. Provided are methods of providing a pharmaceutical composition to a target tissue of a mammalian subject by contacting the target tissue (which contains one or more target cells) with the pharmaceutical composition under conditions such that the pharmaceutical composition, in particular the genome editing system component(s) of the pharmaceutical composition, is substantially retained in the target tissue, meaning that at least 10, 20, 30, 40, 50, 60, 70, 80, 85, 90, 95, 96, 97, 98, 99, 99.9, 99.99 or greater than 99.99% of the pharmaceutical composition is retained in the target tissue. Advantageously, retention is determined by measuring the amount of a component of the genome editing system present in the pharmaceutical composition that enters one or more target cells. For example, at least 1, 5, 10, 20, 30, 40, 50, 60, 70, 80, 85, 90, 95, 96, 97, 98, 99, 99.9, 99.99 or greater than 99.99% of the genome editing system administered to the subject are present intracellularly at a period of time following administration.

[2695] Aspects of the present disclosure are directed to methods of providing a pharmaceutical composition to a target tissue or organ of a mammalian subject, by contacting the target tissue (containing one or more target cells) or organ (containing one or more target cells) with the pharmaceutical composition under conditions such that the pharmaceutical composition is substantially retained in the target tissue or organ. The pharmaceutical composition contains an effective amount of a genome editing system of the present disclosure.

[2696] Pharmaceutical compositions which may be administered intramuscularly and/or subcutaneously may include, but are not limited to, polymers, copolymers, and gels. The polymers, copolymers and/or gels may further be adjusted to modify release kinetics by adjusting factors such as, but not limited to, molecular weight, particle size, payload and/or ratio of the monomers. As a nonlimiting example, formulations administered intramuscularly and/or subcutaneously may include a copolymer such as poly(lactic-co-glycolic acid).

[2697] Localized delivery of the pharmaceutical compositions described herein may be administered by methods such as, but not limited to, topical delivery, ocular delivery, transdermal delivery, and the like. The pharmaceutical composition may also be administered locally to a part of the body not normally available for localized delivery such as, but not limited to, when a subject's body is open to the environment during treatment. The pharmaceutical composition may further be delivered by bathing, soaking and/or surrounding the body part with the pharmaceutical composition.

[2698] However, the present disclosure encompasses the delivery of a genome editing system disclosed herein, and/or pharmaceutical, prophylactic, diagnostic, or imaging compositions thereof, by any appropriate route taking into consideration likely advances in the sciences of drug delivery.

[2699] In some embodiments, an LNP composition includes an ionizable lipid, a phospholipid, a PEG lipid, and a structural lipid. In certain embodiments, the lipid component of the nanoparticle composition includes about 30 mol % to about 60 mol % ionizable lipid, about 0 mol % to about 30 mol % phospholipid, about 18.5 mol % to about 48.5 mol % structural lipid, and about 0 mol % to about 10 mol % of PEG lipid, provided that the total mol % does not exceed 100%. In some embodiments, the lipid component of the nanoparticle composition includes about 35 mol % to about 55 mol % ionizable lipid, about 5 mol % to about 25 mol % phospholipid, about 30 mol % to about 40 mol % structural lipid, and about 0 mol % to about 10 mol % of PEG lipid. In a particular embodiment, the lipid component includes about 50 mol % ionizable lipid, about 10 mol % phospholipid, about 38.5 mol % structural lipid, and about 1.5 mol % of PEG lipid. In another particular embodiment, the lipid component includes about 40 mol % ionizable lipid, about 20 mol % phospholipid, about 38.5 mol % structural lipid, and about 1.5 mol % of PEG lipid. In another particular embodiment, the lipid component includes about 48.5 mol % ionizable lipid, about 10 mol % phospholipid, about 40 mol % structural lipid, and about 1.5 mol % of PEG lipid. In another particular embodiment, the lipid component includes about 48.5 mol % ionizable lipid, about 10 mol % phospholipid, about 39 mol % structural lipid, and about 2.5 mol % of PEG lipid. In some embodiments, the phospholipid may be DOPE or DSPC. In other embodiments, the PEG lipid may be PEG-DMG and/or the structural lipid may be cholesterol. The amount of a genome editing system payload in a nanoparticle composition may depend on the size, composition, desired target and/or application, or other properties of the nanoparticle composition as well as on the properties of the genome editing system. For example, the amount of genome editing system useful in a nanoparticle composition may depend on the size, sequence, and other characteristics of the genome editing system. The relative amounts of genome editing system and other elements (e.g., lipids) in a nanoparticle composition may also vary. In some embodiments, the wt/wt ratio of the lipid component to an enzyme in a nanoparticle composition is about 5:1 to about 60:1, such as 5:1, 6:1, 7:1, 8:1, 9:1, 10:1, 11:1, 12:1, 13:1, 14:1, 15:1, 16:1, 17:1, 18:1, 19:1, 20:1, 25:1, 30:1, 35:1, 40:1, 45:1, 50:1, and 60:1. The amount of a enzyme in a nanoparticle composition may, for example, be measured using absorption spectroscopy (e.g., ultraviolet-visible spectroscopy).

[2700] In some embodiments, an LNP composition containing a genome editing system of the present disclosure, comprising a genome editing system is formulated to provide a specific E:P ratio. The E:P ratio of the composition refers to the molar ratio of nitrogen atoms in one or more lipids to the number of phosphate groups in an RNA. In general, a lower E:P ratio is preferred. The one or more enzymes, lipids, and amounts thereof may be selected to provide an E:P ratio from about 2:1 to about such as 2:1, 3:1, 4:1, 5:1, 6:1, 7:1, 8:1, 9:1, 10:1, 12:1, 14:1, 16:1, 18:1, 20:1, 22:1, 24:1, 26:1, 28:1, or 30:1. In certain embodiments, the E:P ratio is about 2:1 to about 8:1. In other embodiments, the E:P ratio is from about 5:1 to about 8:1. For example, the E:P ratio may be about 5.0:1, about 5.5:1, about about 6.0:1, about 6.5:1, or about 7.0:1.

[2701] The characteristics of an LNP (or “nanoparticles”) composition may depend on the components thereof. For example, a nanoparticle composition including cholesterol as a structural lipid may have different characteristics than a nanoparticle composition that includes a different structural lipid. Similarly, the characteristics of a nanoparticle composition may depend on the absolute or relative amounts of its components. For instance, a nanoparticle composition including a higher molar fraction of a phospholipid may have different characteristics than a nanoparticle composition including a lower molar fraction of a phospholipid. Characteristics may also vary depending on the method and conditions of preparation of the nanoparticle composition. Nanoparticle compositions may be characterized by a variety of methods. For example, microscopy (e.g., transmission electron microscopy or scanning electron microscopy) may be used to examine the morphology and size distribution of a nanoparticle composition. Dynamic light scattering or potentiometry (e.g., potentiometric titrations) may be used to measure Zeta potentials. Dynamic light scattering may also be utilized to determine particle sizes. Instruments such as the Zetasizer Nano ZS (Malvern Instruments Ltd, Malvern, Worcestershire, UK) may also be used to measure multiple characteristics of a nanoparticle composition, Such as particle size, polydispersity index, and Zeta potential.

[2702] The mean size of an LNP composition may be between 10s of nm and 100s of nm, e.g., measured by dynamic light scattering (DLS). For example, the mean size is about 40 nm to about 150 nm, such as about 40 nm, 45 nm, 50 nm, 55 nm, 60 nm, 65 nm, 70 nm, 75 nm, 80 nm, 85 nm, 90 nm, 95 nm, 100 nm, 105 nm, 110 nm, 115 nm, 120 nm, 125 nm, 130 nm, 135 nm, 140 nm, 145 nm, or 150 nm. In some embodiments, the mean size of a nanoparticle composition is about 50 nm to about 100 nm, from about 50 nm to about 90 nm, from about 50 nm to about 80 nm, from about 50 nm to about 70 nm, from about 50 nm to about 60 nm, from about 60 nm to about 100 nm, from about 60 nm to about 90 nm, from about 60 nm to about 80 nm, from about 60 nm to about 70 nm, from about 70 nm to about 100 nm, from about 70 nm to about 90 nm, from about 70 nm to about 80 nm, from about 80 nm to about 100 nm, from about 80 nm to about 90 nm, or from about 90 nm to about 100 nm. In certain embodiments, the mean size of a nanoparticle composition is about 70 nm to about 100 nm. In a particular embodiment, the mean size may be about 80 nm. In other embodiments, the mean size may be about 100 nm.

[2703] A LNP composition may be relatively homogenous. A polydispersity index may be used to indicate the homogeneity of a nanoparticle composition, e.g., the particle size distribution of the nanoparticle compositions. A small (e.g., less than 0.3) polydispersity index generally indicates a narrow particle size distribution. A nanoparticle composition may have a polydispersity index from about 0 to about 0.25, such as 0.01, 0.02, 0.03, 0.04, 0.05, 0.06, 0.07, 0.08, 0.09, 0.10, 0.11, 0.12, 0.13, 0.14, 0.15, 0.16, 0.17, 0.18, 0.19, 0.20, 0.21, 0.22, 0.23, 0.24, or 0.25.

[2704] The Zeta potential of a LNP composition may be used to indicate the electrokinetic potential of the composition. For example, the Zeta potential may describe the surface charge of a nanoparticle composition. Nanoparticle compositions with relatively low charges, positive or negative, are generally desirable, as more highly charged species may interact undesirably with cells, tissues, and other elements in the body. In some embodiments, the Zeta potential of a nanoparticle composition is about −10 mV to about +20 mV, from about −10 mV to about +15 mV, from about −10 mV to about +10 mV, from about −10 mV to about +5 mV, from about −10 mV to about 0 mV, from about −10 mV to about −5 mV, from about −5 mV to about +20 mV, from about −5 mV to about +15 mV, from about −5 mV to about +10 mV, from about −5 mV to about +5 mV, from about −5 mV to about 0 mV, from about 0 mV, to about +20 mV, from about 0 mV to about +15 mV, from about 0 mV to about +10 mV, from about 0 mV to about +5 mV, from about +5 mV to about +20 mV, from about +5 mV, to about +15 mV, or from about +5 mV to about +10 mV.

[2705] The efficiency of encapsulation of an LNP payload describes the amount of payload that is encapsulated or otherwise associated with a nanoparticle composition after preparation, relative to the initial amount provided. The encapsulation efficiency is desirably high (e.g., close to 100%). The encapsulation efficiency may be measured, for example, by comparing the amount of payload in a solution containing the nanoparticle composition before and after breaking up the nanoparticle composition with one or more organic solvents or detergents. Fluorescence may be used to measure the amount of free payload in a solution. For the nanoparticle compositions described herein, the encapsulation efficiency of a therapeutic and/or prophylactic may be at least 50%, for example 50%, 55%, 60%. 65%, 70%, 75%, 80%, 85%, 90%, 91%, 92%, 93%, 94%, 95%, 96%, 97%, 98%, 99%, or 100%. In some embodiments, the encapsulation efficiency may be at least 80%. In certain embodiments, the encapsulation efficiency may be at least 90%.

[2706] Lipids and their method of preparation are disclosed in, e.g., U.S. Pat. No. 8,569,256, and U.S. Patent Publication Nos. 2016/0199485, 2016/0009637, 2015/0273068, 2015/0265708, 2015/0203446, 2015/0005363, 2014/0308304, 2014/0200257, 2013/086373, 2013/0338210, 2013/0323269, 2013/0245107, 2013/0195920, 2013/0123338, 2013/0022649, 2013/0017223, 2012/0295832, 2012/0183581, 2012/0172411, 2012/0027803, 2012/0058188, 2011/0311583, 2011/0311582, 2011/0262527, 2011/0216622, 2011/0117125, 2011/0091525, 2011/0076335, 2011/0060032, 2010/0130588, 2007/0042031, 2006/0240093, 2006/0083780, 2006/0008910, 2005/0175682, 2005/017054, 2005/0118253, 2005/0064595, 2004/0142025, 2007/0042031, 1999/009076 and PCT Pub. Nos. WO 99/39741, WO 2017/117528, WO 2017/004143, WO 2017/075531, WO 2015/199952, WO 2014/008334, WO 2013/086373, WO 2013/086322, WO 2013/016058, WO 2013/086373, WO2011/141705, and WO 2001/07548 and Semple et. al, Nature Biotechnology, 2010, 28, 172-176, the full disclosures of which are herein incorporated by reference in their entirety for all purposes.

[2707] An LNP-based nucleobase editing systems, RNA therapeutics and pharmaceutical compositions may include any substance useful in pharmaceutical compositions. For example, the nanoparticle composition may include one or more pharmaceutically acceptable excipients or accessory ingredients such as, but not limited to, one or more solvents, dispersion media, diluents, dispersion aids, suspension aids, granulating aids, disintegrants, fillers, glidants, liquid vehicles, binders, surface active agents, isotonic agents, thickening or emulsifying agents, buffering agents, lubricating agents, oils, preservatives, and other species. Excipients such as waxes, butters, coloring agents, coating agents, flavorings, and perfuming agents may also be included. Pharmaceutically acceptable excipients are well known in the art (see for example Remington's The Science and Practice of Pharmacy, 21 Edition, A. R. Gennaro: Lippincott, Williams & Wilkins, Baltimore, Md., 2006).

[2708] The LNP-based nucleobase editing systems, RNA therapeutics and pharmaceutical compositions thereof described herein may be administered by any delivery route which results in a therapeutically effective outcome. These include, but are not limited to, enteral (into the intestine), gastroenteral, epidural (into the dura mater), oral (by way of the mouth), transdermal, intracerebral (into the cerebrum), intracerebroventricular (into the cerebral ventricles), epicutaneous (application onto the skin), intradermal (into the skin itself), subcutaneous (under the skin), nasal administration (through the nose), intravenous (into a vein), intravenous bolus, intravenous drip, intra-arterial (into an artery), intramuscular (into a muscle), intracardiac (into the heart), intraosseous infusion (into the bone marrow), intrathecal (into the spinal canal), intraparenchymal (into brain tissue), intraperitoneal (infusion or injection into the peritoneum), intravesical infusion, intravitreal (through the eye), intracavernous injection (into a pathologic cavity) intracavitary (into the base of the penis), intravaginal administration, intrauterine, extra-amniotic administration, transdermal (diffusion through the intact skin for systemic distribution), transmucosal (diffusion through a mucous membrane), transvaginal, insufflation (snorting), sublingual, sublabial, enema, eye drops (onto the conjunctiva), ear drops, auricular (in or by way of the ear), buccal (directed toward the cheek), conjunctival, cutaneous, dental (to a tooth or teeth), electro-osmosis, endocervical, endosinusial, endotracheal, extracorporeal, hemodialysis, infiltration, interstitial, intra-abdominal, intra-amniotic, intra-articular, intrabiliary, intrabronchial, intrabursal, intracartilaginous (within a cartilage), intracaudal (within the cauda equine), intracisternal (within the cisterna magna cerebellomedularis), intracorneal (within the cornea), dental intracoronal, intracoronary (within the coronary arteries), intracorporus cavernosum (within the dilatable spaces of the corporus cavernosa of the penis), intradiscal (within a disc), intraductal (within a duct of a gland), intraduodenal (within the duodenum), intradural (within or beneath the dura), intraepidermal (to the epidermis), intraesophageal (to the esophagus), intragastric (within the stomach), intragingival (within the gingivae), intraileal (within the distal portion of the small intestine), intralesional (within or introduced directly to a localized lesion), intraluminal (within a lumen of a tube), intralymphatic (within the lymph), intramedullary (within the marrow cavity of a bone), intrameningeal (within the meninges), intramyocardial (within the myocardium), intraocular (within the eye), intraovarian (within the ovary), intrapericardial (within the pericardium), intrapleural (within the pleura), intraprostatic (within the prostate gland), intrapulmonary (within the lungs or its bronchi), intrasinal (within the nasal or periorbital sinuses), intraspinal (within the vertebral column), intrasynovial (within the synovial cavity of a joint), intratendinous (within a tendon), intratesticular (within the testicle), intrathecal (within the cerebrospinal fluid at any level of the cerebrospinal axis), intrathoracic (within the thorax), intratubular (within the tubules of an organ), intratumor (within a tumor), intratympanic (within the aurus media), intravascular (within a vessel or vessels), intraventricular (within a ventricle), iontophoresis (by means of electric current where ions of soluble salts migrate into the tissues of the body), irrigation (to bathe or flush open wounds or body cavities), laryngeal (directly upon the larynx), nasogastric (through the nose and into the stomach), occlusive dressing technique (topical route administration which is then covered by a dressing which occludes the area), ophthalmic (to the external eye), oropharyngeal (directly to the mouth and pharynx), parenteral, percutaneous, periarticular, peridural, perineural, periodontal, rectal, respiratory (within the respiratory tract by inhaling orally or nasally for local or systemic effect), retrobulbar (behind the pons or behind the eyeball), soft tissue, subarachnoid, subconjunctival, submucosal, topical, transplacental (through or across the placenta), transtracheal (through the wall of the trachea), transtympanic (across or through the tympanic cavity), ureteral (to the ureter), urethral (to the urethra), vaginal, caudal block, diagnostic, nerve block, biliary perfusion, cardiac perfusion, photopheresis, and spinal.

[2709] In some embodiments, compositions may be administered in a way which allows them to cross the blood-brain barrier, vascular barrier, or other epithelial barrier. The originator constructs, benchmark constructs, and targeting systems may be administered in any suitable form, either as a liquid solution or suspension, as a solid form suitable for liquid solution or suspension in a liquid solution. The originator constructs, benchmark constructs, and targeting systems may be formulated with any appropriate and pharmaceutically acceptable excipient.

[2710] In some embodiments, the originator constructs, benchmark constructs, and targeting systems may be delivered to a subject via a single route administration.

[2711] In some embodiments, the originator constructs, benchmark constructs, and targeting systems may be delivered to a subject via a multi-site route of administration. A subject may be administered at 2, 3, 4, 5, or more than 5 sites.

[2712] In some embodiments, a subject may be administered the originator constructs, benchmark constructs, and targeting systems using a bolus infusion.

[2713] In some embodiments, a subject may be administered originator constructs, benchmark constructs, and targeting systems using sustained delivery over a period of minutes, hours, or days. The infusion rate may be changed depending on the subject, distribution, formulation or another delivery parameter.

[2714] In some embodiments, the originator constructs, benchmark constructs, and targeting systems may be delivered by intramuscular delivery route. Non-limiting examples of intramuscular administration include an intravenous injection or a subcutaneous injection.

[2715] In some embodiments, the originator constructs, benchmark constructs, and targeting systems may be delivered by oral administration. Non-limiting examples of oral delivery include a digestive tract administration and a buccal administration.

[2716] In some embodiments, the originator constructs, benchmark constructs, and targeting systems may be delivered by intraocular delivery route. A non-limiting example of intraocular delivery include an intravitreal injection.

[2717] In some embodiments, the originator constructs, benchmark constructs, and targeting systems may be delivered by intranasal delivery route. Non-limiting examples of intranasal delivery include nasal drops or nasal sprays.

[2718] In some embodiments, the originator constructs, benchmark constructs, and targeting systems may be administered to a subject by peripheral injections. Non-limiting examples of peripheral injections include intraperitoneal, intramuscular, intravenous, conjunctival, or joint injection.

[2719] In some embodiments, the originator constructs, benchmark constructs, and targeting systems may be delivered by injection into the cerebrospinal fluid. Non-limiting examples of delivery to the cerebrospinal fluid include intrathecal and intracerebroventricular administration.

[2720] In some embodiments, the originator constructs, benchmark constructs, and targeting systems may be delivered by systemic delivery. As a non-limiting example, the systemic delivery may be by intravascular administration.

[2721] In some embodiments, the originator constructs, benchmark constructs, and targeting systems may be administered to a subject by intracranial delivery.

[2722] In some embodiments, the originator constructs, benchmark constructs, and targeting systems may be administered to a subject by intraparenchymal administration.

[2723] In some embodiments, the originator constructs, benchmark constructs, and targeting systems may be administered to a subject by intramuscular administration.

[2724] In some embodiments, the originator constructs, benchmark constructs, and targeting systems are administered to a subject and transduce muscle of a subject. As a non-limiting example, the originator constructs, benchmark constructs, and targeting systems are administered by intramuscular administration.

[2725] In some embodiments, the originator constructs, benchmark constructs, and targeting systems may be administered to a subject by intravenous administration.

[2726] In some embodiments, the originator constructs, benchmark constructs, and targeting systems may be administered to a subject by subcutaneous administration.

[2727] In some embodiments, the originator constructs, benchmark constructs, and targeting systems may be administered to a subject by topical administration.

[2728] In some embodiments, the originator constructs, benchmark constructs, and targeting systems may be delivered by more than one route of administration.

[2729] The originator constructs, benchmark constructs, and targeting systems described herein may be co-administered in conjunction with one or more originator constructs, benchmark constructs, targeting systems, or therapeutic agents or moieties.

[2730] In some embodiments, pharmaceutical compositions and/or formulations described herein may be administered parenterally. Liquid dosage forms for oral and parenteral administration include, but are not limited to, pharmaceutically acceptable emulsions, microemulsions, solutions, suspensions, syrups, and/or elixirs. In addition to active ingredients, liquid dosage forms may comprise inert diluents commonly used in the art such as, for example, water or other solvents, solubilizing agents and emulsifiers such as ethyl alcohol, isopropyl alcohol, ethyl carbonate, ethyl acetate, benzyl alcohol, benzyl benzoate, propylene glycol, 1,3-butylene glycol, dimethylformamide, oils (in particular, cottonseed, groundnut, corn, germ, olive, castor, and sesame oils), glycerol, tetrahydrofurfuryl alcohol, polyethylene glycols and fatty acid esters of sorbitan, and mixtures thereof. Besides inert diluents, oral compositions can include adjuvants such as wetting agents, emulsifying and suspending agents, sweetening, flavoring, and/or perfuming agents. In certain embodiments for parenteral administration, compositions are mixed with solubilizing agents such as CREMOPHOR®, alcohols, oils, modified oils, glycols, polysorbates, cyclodextrins, polymers, and/or combinations thereof. In other embodiments, surfactants are included such as hydroxypropylcellulose.

[2731] Injectable preparations, for example, sterile injectable aqueous or oleaginous suspensions may be formulated according to the known art using suitable dispersing agents, wetting agents, and/or suspending agents. Sterile injectable preparations may be sterile injectable solutions, suspensions, and/or emulsions in nontoxic parenterally acceptable diluents and/or solvents, for example, as a solution in 1,3-butanediol. Among the acceptable vehicles and solvents that may be employed are water, Ringer's solution, U.S.P., and isotonic sodium chloride solution. Sterile, fixed oils are conventionally employed as a solvent or suspending medium. For this purpose, any bland fixed oil can be employed including synthetic mono- or diglycerides. Fatty acids such as oleic acid can be used in the preparation of injectables.

[2732] Injectable formulations may be sterilized, for example, by filtration through a bacterial-retaining filter, and/or by incorporating sterilizing agents in the form of sterile solid compositions which can be dissolved or dispersed in sterile water or other sterile injectable medium prior to use.

[2733] In order to prolong the effect of active ingredients, it is often desirable to slow the absorption of active ingredients from subcutaneous or intramuscular injections. This may be accomplished by the use of liquid suspensions of crystalline or amorphous material with poor water solubility. The rate of absorption of active ingredients depends upon the rate of dissolution which, in turn, may depend upon crystal size and crystalline form. Alternatively, delayed absorption of a parenterally administered drug form is accomplished by dissolving or suspending the drug in an oil vehicle. Injectable depot forms are made by forming microencapsule matrices of the drug in biodegradable polymers such as polylactide-polyglycolide. Depending upon the ratio of drug to polymer and the nature of the particular polymer employed, the rate of drug release can be controlled. Examples of other biodegradable polymers include poly(orthoesters) and poly(anhydrides). Depot injectable formulations are prepared by entrapping the drug in liposomes or microemulsions which are compatible with body tissues.

[2734] In some embodiments, pharmaceutical compositions and/or formulations described herein may be formulated for administration topically. The skin may be an ideal target site for delivery as it is readily accessible. Three routes are commonly considered to deliver pharmaceutical compositions and/or formulations described herein to the skin: (i) topical application (e.g. for local/regional treatment and/or cosmetic applications); (ii) intradermal injection (e.g. for local/regional treatment and/or cosmetic applications); and (iii) systemic delivery (e.g. for treatment of dermatologic diseases that affect both cutaneous and extracutaneous regions).

[2735] In some embodiments, pharmaceutical compositions and/or formulations described herein may be delivered using a variety of dressings (e.g., wound dressings) or bandages (e.g., adhesive bandages) for conveniently and/or effectively carrying out methods described herein. Typically dressing or bandages may comprise sufficient amounts of pharmaceutical compositions and/or formulations described herein to allow users to perform multiple treatments.

[2736] Dosage forms for topical and/or transdermal administration may include ointments, pastes, creams, lotions, gels, powders, solutions, sprays, inhalants and/or patches. Generally, active ingredients are admixed under sterile conditions with pharmaceutically acceptable excipients and/or any needed preservatives and/or buffers. Additionally, contemplated herein is the use of transdermal patches, which often have the added advantage of providing controlled delivery of pharmaceutical compositions and/or formulations described herein to the body. Such dosage forms may be prepared, for example, by dissolving and/or dispensing pharmaceutical compositions and/or formulations described herein in the proper medium. Alternatively, or additionally, rates may be controlled by either providing rate controlling membranes and/or by dispersing pharmaceutical compositions and/or formulations described herein in a polymer matrix and/or gel.

[2737] Formulations suitable for topical administration include, but are not limited to, liquid and/or semi liquid preparations such as liniments, lotions, oil in water and/or water in oil emulsions such as creams, ointments and/or pastes, and/or solutions and/or suspensions.

[2738] Topically-administrable formulations may, for example, comprise from about 1% to about 10% (w/w) active ingredient, although the concentration of active ingredient may be as high as the solubility limit of the active ingredient in the solvent. Formulations for topical administration may further comprise one or more of the additional ingredients described herein.

[2739] In some embodiments, pharmaceutical compositions and/or formulations described herein may be prepared, packaged, and/or sold in formulations suitable for ophthalmic and/or otic administration. Such formulations may, for example, be in the form of eye and/or ear drops including, for example, a 0.1/1.0% (w/w) solution and/or suspension of the active ingredient in aqueous and/or oily liquid excipients. Such drops may further comprise buffering agents, salts, and/or one or more other of any additional ingredients described herein. Other ophthalmically-administrable formulations which are useful include those which comprise active ingredients in microcrystalline form and/or in liposomal preparations. Subretinal inserts may also be used as forms of administration.

[2740] In some embodiments, pharmaceutical compositions and/or formulations described herein may be administered orally. Solid dosage forms for oral administration include capsules, tablets, pills, powders, and granules. In such solid dosage forms, an active ingredient is mixed with at least one inert, pharmaceutically acceptable excipient such as sodium citrate or dicalcium phosphate and/or fillers or extenders (e.g. starches, lactose, sucrose, glucose, mannitol, and silicic acid), binders (e.g. carboxymethylcellulose, alginates, gelatin, polyvinylpyrrolidinone, sucrose, and acacia), humectants (e.g. glycerol), disintegrating agents (e.g. agar, calcium carbonate, potato or tapioca starch, alginic acid, certain silicates, and sodium carbonate), solution retarding agents (e.g. paraffin), absorption accelerators (e.g. quaternary ammonium compounds), wetting agents (e.g. cetyl alcohol and glycerol monostearate), absorbents (e.g. kaolin and bentonite clay), and lubricants (e.g. talc, calcium stearate, magnesium stearate, solid polyethylene glycols, sodium lauryl sulfate), and mixtures thereof. In the case of capsules, tablets and pills, the dosage form may comprise buffering agents.

[2741] In some embodiments, pharmaceutical compositions and/or formulations described herein are formulated in depots for extended release.

[2742] In some embodiments, pharmaceutical compositions and/or formulations described herein are spatially retained within or proximal to target tissues. Provided are methods of providing pharmaceutical compositions and/or formulations described herein to target tissues of mammalian subjects by contacting target tissues (which comprise one or more target cells) with pharmaceutical compositions and/or formulations described herein under conditions such that they are substantially retained in target tissues, meaning that at least 10, 20, 30, 40, 50, 60, 70, 80, 85, 90, 95, 96, 97, 98, 99, 99.9, 99.99 or greater than 99.99% of the composition is retained in the target tissues. Advantageously, retention is determined by measuring the amount of pharmaceutical compositions and/or formulations described herein that enter one or more target cells. For example, at least 1%, 5%, 10%, 20%, 30%, 40%, 50%, 60%, 70%, 80%, 85%, 90%, 95%, 96%, 97%, 98%, 99%, 99.9%, 99.99%, or greater than 99.99% of pharmaceutical compositions and/or formulations described herein administered to subjects are present intracellularly at a period of time following administration. For example, intramuscular injection to mammalian subjects may be performed using aqueous compositions comprising an active ingredient and one or more transfection reagents, and retention is determined by measuring the amount of active ingredient present in muscle cells.

[2743] In some embodiments, provided are methods for delivering pharmaceutical compositions and/or formulations described herein to target tissues of mammalian subjects, by contacting target tissues (comprising one or more target cells) with pharmaceutical compositions and/or formulations described herein under conditions such that they are substantially retained in such target tissues. Pharmaceutical compositions and/or formulations described herein comprise enough active ingredient such that the effect of interest is produced in at least one target cell. In some embodiments, pharmaceutical compositions and/or formulations described herein generally comprise one or more cell penetration agents, although “naked” formulations (such as without cell penetration agents or other agents) are also contemplated, with or without pharmaceutically acceptable carriers.

[2744] In some embodiments, pharmaceutical compositions and/or formulations described herein may be prepared, packaged, and/or sold in formulations suitable for pulmonary administration. In some embodiments, such administration is via the buccal cavity. In some embodiments, formulations may comprise dry particles comprising active ingredients. In such embodiments, dry particles may have a diameter in the range from about 0.5 nm to about 7 nm or from about 1 nm to about 6 nm. In some embodiments, formulations may be in the form of dry powders for administration using devices comprising dry powder reservoirs to which streams of propellant may be directed to disperse such powder. In some embodiments, self-propelling solvent/powder dispensing containers may be used. In such embodiments, active ingredients may be dissolved and/or suspended in low-boiling propellant in sealed containers. Such powders may comprise particles wherein at least 98% of the particles by weight have diameters greater than 0.5 nm and at least 95% of the particles by number have diameters less than 7 nm. Alternatively, at least 95% of the particles by weight have a diameter greater than 1 nm and at least 90% of the particles by number have a diameter less than 6 nm. Dry powder compositions may include a solid fine powder diluent such as sugar and are conveniently provided in a unit dose form.

[2745] Low boiling propellants generally include liquid propellants having a boiling point of below 65° F. at atmospheric pressure. Generally, propellants may constitute 50% to 99.9% (w/w) of the composition, and active ingredient may constitute 0.1% to 20% (w/w) of the composition. Propellants may further comprise additional ingredients such as liquid non-ionic and/or solid anionic surfactant and/or solid diluent (which may have particle sizes of the same order as particles comprising active ingredients).

[2746] Pharmaceutical compositions formulated for pulmonary delivery may provide active ingredients in the form of droplets of solution and/or suspension. Such formulations may be prepared, packaged, and/or sold as aqueous and/or dilute alcoholic solutions and/or suspensions, optionally sterile, comprising active ingredients, and may conveniently be administered using any nebulization and/or atomization device. Such formulations may further comprise one or more additional ingredients including, but not limited to, a flavoring agent such as saccharin sodium, a volatile oil, a buffering agent, a surface active agent, and/or a preservative such as methylhydroxybenzoate. Droplets provided by this route of administration may have an average diameter in the range from about 0.1 nm to about 200 nm.

[2747] In some embodiments, pharmaceutical compositions and/or formulations described herein may be administered nasally and/or intranasal. In some embodiments, formulations described herein useful for pulmonary delivery may also be useful for intranasal delivery. In some embodiments, formulations for intranasal administration comprise a coarse powder comprising the active ingredient and having an average particle from about 0.2 μm to 500 μm. Such formulations are administered in the manner in which snuff is taken, i.e. by rapid inhalation through the nasal passage from a container of the powder held close to the nose.

[2748] Formulations suitable for nasal administration may, for example, comprise from about as little as 0.1% (w/w) and as much as 100% (w/w) of active ingredient, and may comprise one or more of the additional ingredients described herein. A pharmaceutical composition may be prepared, packaged, and/or sold in a formulation suitable for buccal administration. Such formulations may, for example, be in the form of tablets and/or lozenges made using conventional methods, and may, for example, 0.1% to 20% (w/w) active ingredient, the balance comprising an orally dissolvable and/or degradable composition and, optionally, one or more of the additional ingredients described herein. Alternately, formulations suitable for buccal administration may comprise powders and/or an aerosolized and/or atomized solutions and/or suspensions comprising active ingredients. Such powdered, aerosolized, and/or aerosolized formulations, when dispersed, may comprise average particle and/or droplet sizes in the range of from about 0.1 nm to about 200 nm, and may further comprise one or more of any additional ingredients described herein.

[2749] In some embodiments, pharmaceutical compositions and/or formulations described herein may be administered rectally and/or vaginally. Compositions for rectal or vaginal administration are typically suppositories which can be prepared by mixing compositions with suitable non-irritating excipients such as cocoa butter, polyethylene glycol or a suppository wax which are solid at ambient temperature but liquid at body temperature and therefore melt in the rectum or vaginal cavity and release the active ingredient.

### I. Host Cells

[2750] One aspect of the disclosure provides an isolated host cell that includes one or more of the compositions described herein, including, but not limited to, a Cas12a (or Cas Type V) gene editing systems or any component thereof. In some embodiments, the host cell is a prokaryotic cell, an archaeal cell, or a eukaryotic host cell. In some embodiments, the eukaryotic host cell is a mammalian cell, such as a human cell, a non-human cell, or a non-human mammalian cell. In some embodiments, the host cell is an artificial cell or genetically modified cell. In some embodiments, the host cell is in vitro, such as a tissue culture cell. In some embodiments, the host cell is within a living host organism.

[2751] Cells that may contain any of the compositions described herein. The methods described herein are used to deliver a Cas12a (or Cas Type V) gene editing system described herein into a eukaryotic cell (e.g., a mammalian cell, such as a human cell). In some embodiments, the cell is in vitro (e.g., cultured cell. In some embodiments, the cell is in vivo (e.g., in a subject such as a human subject). In some embodiments, the cell is ex vivo (e.g., isolated from a subject and may be administered back to the same or a different subject).

[2752] The present disclosure contemplates the use of any suitable host cell. For example, the cell host can be a mammalian cell. Mammalian cells of the present disclosure include human cells, primate cells (e.g., vero cells), rat cells (e.g., GH3 cells, 0C23 cells) or mouse cells (e.g., MC3T3 cells). There are a variety of human cell lines, including, without limitation, human embryonic kidney (HEK) cells, HeLa cells, cancer cells from the National Cancer Institute's 60 cancer cell lines (NCI60), DU145 (prostate cancer) cells, Lncap (prostate cancer) cells, MCF-7 (breast cancer) cells, MDA-MB-438 (breast cancer) cells, PC3 (prostate cancer) cells, T47D (breast cancer) cells, THP-1 (acute myeloid leukemia) cells, U87 (glioblastoma) cells, SHSY5Y human neuroblastoma cells (cloned from a myeloma) and Saos-2 (bone cancer) cells. In some embodiments, the cells can be human embryonic kidney (HEK) cells (e.g., HEK 293 or HEK 293T cells). In some embodiments, the cells can be stem cells (e.g., human stem cells) such as, for example, pluripotent stem cells (e.g., human pluripotent stem cells including human induced pluripotent stem cells (hiPSCs)). A stem cell refers to a cell with the ability to divide for indefinite periods in culture and to give rise to specialized cells. A pluripotent stem cell refers to a type of stem cell that is capable of differentiating into all tissues of an organism, but not alone capable of sustaining full organismal development. A human induced pluripotent stem cell refers to a somatic (e.g., mature or adult) cell that has been reprogrammed to an embryonic stem cell-like state by being forced to express genes and factors important for maintaining the defining properties of embryonic stem cells (see, e.g., Takahashi and Yamanaka, Cell 126 (4): 663-76, 2006, incorporated by reference herein). Human induced pluripotent stem cells express stem cell markers and are capable of generating cells characteristic of all three germ layers (ectoderm, endoderm, mesoderm).

[2753] Some aspects of this disclosure provide cells comprising any of the compositions disclosed herein, including, but not limited to, Cas12a (or Cas Type V) gene editing systems and components and vector or vector systems encoding the engineered gene editing systems, and any combinations thereof. In some embodiments, a host cell is transiently or non-transiently transfected with one or more delivery systems described herein, including virus-based systems, virus-like particle systems, and non-virus-base delivery, including LNPs and liposomes. In some embodiments, a cell is transfected as it naturally occurs in a subject. In some embodiments, a cell that is transfected is taken from a subject, i.e., ex vivo transfection. In some embodiments, the cell is derived from cells taken from a subject, such as a cell line. A wide variety of cell lines for tissue culture are known in the art. Examples of cell lines include, but are not limited to, C8161, CCRF-CEM, MOLT, mIMCD-3, NHDF, HeLa-S3, Huhl, Huh4, Huh7, HUVEC, HASMC, HEKn, HEKa, MiaPaCell, Pancl, PC-3, TF1, CTLL-2, C1R, Rath, CV1, RPTE, A10, T24, J82, A375, ARH-77, Calul, SW480, SW620, SKOV3, SK-UT, CaCo2, P388D1, SEM-K2, WEHI-231, HB56, TIB55, Jurkat, J45.01, LRMB, Bcl-1, BC-3, IC21, DLD2, Raw264.7, NRK, NRK-52E, MRCS, MEF, Hep G2, HeLa B, HeLa T4, COS, COS-1, COS-6, COS-M6A, BS-C-1 monkey kidney epithelial, BALB/3T3 mouse embryo fibroblast, 3T3 Swiss, 3T3-L1, 132-d5 human fetal fibroblasts; 10.1 mouse fibroblasts, 293-T, 3T3, 721, 9L, A2780, A2780ADR, A2780cis, A 172, A20, A253, A431, A-549, ALC, B16, B35, BCP-1 cells, BEAS-2B, bEnd.3, BHK-21, BR 293. BxPC3. C3H-10T1/2, C6/36, Cal-27, CHO, CHO-7, CHO-IR, CHO-K1, CHO-K2, CHO-T, CHO Dhfr −/−, COR-L23, COR-L23/CPR, COR-L2315010, COR-L23/R23, COS-7, COV-434, CML T1, CMT, CT26, D17, DH82, DU145, DuCaP, EL4, EM2, EM3, EMT6/AR1, EMT6/AR10.0, FM3, H1299, H69, HB54, HB55, HCA2, HEK-293, HeLa, Hepalc1c7, HL-60, HMEC, HT-29, Jurkat, JY cells, K562 cells, Ku812, KCL22, KG1, KYO1, LNCap, Ma-Mel 1-48, MC-38, MCF-7, MCF-10A, MDA-MB-231, MDA-MB-468, MDA-MB-435, MDCK II, MDCK 11, MOR/0.2R, MONO-MAC 6, MTD-1A, MyEnd, NCI-H69/CPR, NCI-H69/LX10, NCI-H69/LX20, NCI-H69/LX4, NIH-3T3, NALM-1, NW-145, OPCN/OPCT cell lines, Peer, PNT-1A/PNT 2, RenCa, RMA/RMAS, Saos-2 cells, Sf-9, SkBr3, T2, T-47D, T84, THP1 cell line, U373, U87, U937, VCaP, Vero cells, WM39, WT-49, X63, YAC-1, YAR, and transgenic varieties thereof.

[2754] Cell lines are available from a variety of sources known to those with skill in the art (see, e.g., the American Type Culture Collection (ATCC) (Manassas, Va.)). In some embodiments, a cell transfected with one or more retron delivery systems described herein is used to establish a new cell line comprising one or more nucleic acid molecules encoding the recombinant retron-based gene editing systems described herein, or encoding at last a component of said systems (e.g., a recombinant ncRNA or a recombinant retron RT).

[2755] It is an object of the invention to deliver the herein described genome editing system into various host cells. Preferably, each of the components of the genome editing system are delivered together. In other embodiments, one or more of the components of the genome editing system are delivered separately. In some embodiments, the gene editing components are delivered as DNA molecule, RNA molecules, proteins, nucleoproteins, or combinations thereof.

[2756] Alternatively, provided also are delivery of the genome editing system using plasmids.

[2757] Suitable host cell is selected from one or more prokaryotic cells, mammalian cells, human cells or synthetic cells. Various tissue types are selected based on the delivery modality. In various embodiments, the various host cells transformed, transduced or the uptake of the genome editing system produces a site-specific modification of a targeted polynucleotide sequence of a host cell genome.

[2758] Exemplary host cells for the methods and compositions of the invention include but are not limited to prokaryotic cells, yeast or fungal cells, archaea cells, plant cells, animal cells or human cells.

[2759] In various other aspects, provided are fusion protein comprising an isolated polypeptide encoded by an isolated or recombinant nucleic acid sequence fused to a heterologous amino acid sequence. Preferably, the fusion protein comprises a nuclease-deficient polypeptide.

[2760] In preferred aspects, the Cas12a (or Cas Type V) gene editing systems described herein rely on the cells' DNA repair pathways. DNA double-stranded breaks (DSBs) are repaired in cells via the error-prone non-homologous end-joining (NHEJ), or the error-free homologous recombination (HR), the most common form of homology-directed repair (HDR). The DSB repair through NHEJ creates small insertions or deletions (indels), while HDR requires a repair template, which could be a sister chromatid, another homologous region, or an exogenous repair donor. Preferably, the double-stranded breaks (DSBs) created by the Cas12a nuclease makes deletions or insertions at a precise loci in the host cell genome. Accordingly, in some embodiments, the method of modifying a targeted polynucleotide sequence comprises homology-directed repair (HDR). In other embodiments, use of the Cas12a complex for HDR provides an efficiency of HDR of 1, 1.5, 2, 2.5, 3, 3.5, 4, 4.5, 5, 5.5, 6, 6.5, 7, 7.5, 8, 8.5, 9, 9.5, 10 or higher-fold improvement.

| | | | | Advances in genetic | Strategies for | |
|---|---|---|---|---|---|---|
| | Cassettes for CRISPR/Cas [symbol] | | | modification using | improving | |
| Species | Cas [symbol] protein | gRNA | Editing efficiency | CRISPR/Cas [symbol] | efficiency | References |
| [symbol] | [symbol] | [symbol] | [symbol] | [symbol] | [symbol] | [symbol] |

[symbol]

indicates data missing or illegible when filed

[2761] In some cases, the method of modifying a targeted polynucleotide sequence comprises non-homologous end joining (NHEJ). In certain cases, use of the Cas12a complex for NHEJ provides an efficiency of 1, 1.5, 2, 2.5, 3, 3.5, 4, 4.5, 5, 5.5, 6, 6.5, 7, 7.5, 8, 8.5, 9, 9.5, 10 or higher-fold improvement.

### J. Methods of Use

### Gene Editing

[2762] In some embodiments, the Cas12a (or Cas Type V) gene editing systems described herein (including any described or contemplated format, such as a Cas12a base editor, Cas12a prime editor, or Cas12a retron editor) are used for genome editing at a desired site. In some embodiments, the Cas12a (or Cas Type V) systems include a DNA donor template comprising an edited sequence.

[2763] In some embodiments, the DNA donor template has 10-100 or more bp of homologous nucleic acid sequence to the genome on both sides of the desired edit. The desired edit (insertion, deletion, or mutation) is in between the homologous sequence.

[2764] In some embodiments, DNA donor template comprise a sequence comprising an intended genome edit flanked by a pair of homology arms responsible for targeting the donor polynucleotide to the target locus to be edited in a cell. The donor polynucleotide typically comprises a 5′ homology arm that hybridizes to a 5′ genomic target sequence and a 3′ homology arm that hybridizes to a 3′ genomic target sequence. The homology arms are referred to herein as 5′ and 3′ (i.e., upstream and downstream) homology arms, which relate to the relative position of the homology arms to the nucleotide sequence comprising the intended edit within the donor polynucleotide. The 5′ and 3′ homology arms hybridize to regions within the target locus in the genomic DNA to be modified, which are referred to herein as the “5′ target sequence” and “3′ target sequence,” respectively.

[2765] The homology arm must be sufficiently complementary for hybridization to the target sequence to mediate homologous recombination between the donor polynucleotide and genomic DNA at the target locus. For example, a homology arm may comprise a nucleotide sequence having at least about 80-100% sequence identity to the corresponding genomic target sequence, including any percent identity within this range, such as at least 80%, 81%, 82%, 83%, 84%, 85%, 86%, 87%, 88%, 89%, 90%, 91%, 92%, 93%, 94%, 95%, 96%, 97%, 98%, 99% or 100% sequence identity thereto, wherein the nucleotide sequence comprising the intended edit can be integrated into the genomic DNA by HDR at the genomic target locus recognized (i.e., having sufficient complementary for hybridization) by the 5′ and 3′ homology arms.

[2766] In some embodiments, the corresponding homologous nucleotide sequences in the genomic target sequence (i.e., the “5′ target sequence” and “3′ target sequence”) flank a specific site for cleavage and/or a specific site for introducing the intended edit. The distance between the specific cleavage site and the homologous nucleotide sequences (e.g., each homology arm) can be several hundred nucleotides. In some embodiments, the distance between a homology arm and the cleavage site is 200 nucleotides or less (e.g., 0, 10, 20, 30, 50, 75, 100, 125, 150, 175, and 200 nucleotides). In most cases, a smaller distance may give rise to a higher gene targeting rate. In some embodiments, the donor polynucleotide is substantially identical to the target genomic sequence, across its entire length except for the sequence changes to be introduced to a portion of the genome that encompasses both the specific cleavage site and the portions of the genomic target sequence to be altered.

[2767] A homology arm can be of any length, e.g. 10 nucleotides or more, 15 nucleotides or more, 20 nucleotides or more, 50 nucleotides or more, 100 nucleotides or more, 250 nucleotides or more, 300 nucleotides or more, 350 nucleotides or more, 400 nucleotides or more, 450 nucleotides or more, 500 nucleotides or more, 1000 nucleotides (1 kb) or more, 5000 nucleotides (5 kb) or more, 10000 nucleotides (10 kb) or more, etc. In some instances, the 5′ and 3′ homology arms are substantially equal in length to one another. However, in some instances the 5′ and 3′ homology arms are not necessarily equal in length to one another. For example, one homology arm may be 30% shorter or less than the other homology arm, 20% shorter or less than the other homology arm, 10% shorter or less than the other homology arm, 5% shorter or less than the other homology arm, 2% shorter or less than the other homology arm, or only a few nucleotides less than the other homology arm. In other instances, the 5′ and 3′ homology arms are substantially different in length from one another, e.g. one may be 40% shorter or more, 50% shorter or more, sometimes 60% shorter or more, 70% shorter or more, 80% shorter or more, 90% shorter or more, or 95% shorter or more than the other homology arm.

[2768] The DNA donor template may be used in combination with an RNA-guided nuclease, which is targeted to a particular genomic sequence (i.e., genomic target sequence to be modified) by a guide RNA. A target-specific guide RNA comprises a nucleotide sequence that is complementary to a genomic target sequence, and thereby mediates binding of the nuclease-gRNA complex by hybridization at the target site. For example, the gRNA can be designed with a sequence complementary to the sequence of a minor allele to target the nuclease-gRNA complex to the site of a mutation. The mutation may comprise an insertion, a deletion, or a substitution. For example, the mutation may include a single nucleotide variation, gene fusion, translocation, inversion, duplication, frameshift, missense, nonsense, or other mutation associated with a phenotype or disease of interest. The targeted minor allele may be a common genetic variant or a rare genetic variant. In some embodiments, the gRNA is designed to selectively bind to a minor allele with single base-pair discrimination, for example, to allow binding of the nuclease-gRNA complex to a single nucleotide polymorphism (SNP). In particular, the gRNA may be designed to target disease-relevant mutations of interest for the purpose of genome editing to remove the mutation from a gene. Alternatively, the gRNA can be designed with a sequence complementary to the sequence of a major or wild-type allele to target the nuclease-gRNA complex to the allele for the purpose of genome editing to introduces a mutation into a gene in the genomic DNA of the cell, such as an insertion, deletion, or substitution. Such genetically modified cells can be used, for example, to alter phenotype, confer new properties, or produce disease models for drug screening.

[2769] In some embodiments, the Cas12a (or Cas Type V) editing systems can comprise one or more additional RNA-guided nuclease used for genome modification is a clustered regularly interspersed short palindromic repeats (CRISPR) system Cas nuclease. Any RNA-guided Cas nuclease capable of catalyzing site-directed cleavage of DNA to allow integration of donor polynucleotides by the HDR mechanism can be used in genome editing, including CRISPR system Class 1, Type I, II, or III Cas nucleases; Class 2, Type II nuclease (such as Cas9); a Class 2, Type V nuclease (such as Cpfl), or a Class 2, Type VI nuclease (such as C2c2). Examples of Cas proteins include Cas1, CaslB, Cas2, Cas3, Cas4, Cas5, Cas5e (CasD), Cash, Cas6e, Cas6f, Cas7, Cas8al, Cas8a2, Cas8b, Cas8c, Cas9 (Csnl or Csx12), Cas10, CaslOd, CasF, CasG, CasH, Csyl, Csy2, Csy3, Csel (CasA), Cse2 (CasB), Cse3 (CasE), Cse4 (CasC), Cscl, Csc2, Csa5, Csn2, Csm2, Csm3, Csm4, Csm5, Csm6, Cmrl, Cmr3, Cmr4, Cmr5, Cmr6, Csbl, Csb2, Csb3, Csx17, Csx14, Csx10, Csx16, CsaX, Csx3, Csxl, Csx15, Csfl, Csf2, Csf3, Csf4, and Cul966, and homologs or modified versions thereof.

[2770] In some embodiments, a Class 1, type II CRISPR system Cas9 endonuclease is used. Cas9 nucleases from any species, or biologically active fragments, variants, analogs, or derivatives thereof that retain Cas9 endonuclease activity (i.e., catalyze site-directed cleavage of DNA to generate double-strand breaks) may be used to perform genome modification as described herein. The Cas9 need not be physically derived from an organism but may be synthetically or recombinantly produced. Cas9 sequences from a number of bacterial species are well known in the art and listed in the National Center for Biotechnology Information (NCBI) database. See, for example, NCBI entries for Cas9 from: Streptococcus pyogenes (WP 002989955, WP_038434062, WP_011528583); Campylobacter jejuni (WP_022552435, YP 002344900), Campylobacter coli (WP 060786116); Campylobacter fetus (WP 059434633); Corynebacterium ulcerans (NC_015683, NC_017317); Corynebacterium diphtheria (NC_016782, NC_016786); Enterococcus faecalis (WP 033919308); Spiroplasma syrphidicola (NC 021284); Prevotella intermedia (NC 017861); Spiroplasma taiwanense (NC 021846); Streptococcus iniae (NC 021314); Belliella baltica (NC 018010); Psychroflexus torquisl (NC O 18721); Streptococcus thermophilus (YP 820832), Streptococcus mutans (WP 061046374, WP 024786433); Listeria innocua (NP 472073); Listeria monocytogenes (WP 061665472); Legionella pneumophila (WP 062726656); Staphylococcus aureus (WP_001573634); Francisella tularensis (WP_032729892, WP_014548420), Enterococcus faecalis (WP 033919308); Lactobacillus rhamnosus (WP 048482595, WP_032965177); and Neisseria meningitidis (WP_061704949, YP_002342100); all of which sequences (as entered by the date of filing of this application) are herein incorporated by reference in their entireties. Any of these sequences or a variant thereof comprising a sequence having at least about 70-100% sequence identity thereto, including any percent identity within this range, such as 70, 71, 72, 73, 74, 75, 76, 77, 78, 79, 80, 81, 82, 83, 84, 85, 86, 87, 88, 89, 90, 91, 92, 93, 94, 95, 96, 97, 98, or 99% sequence identity thereto, can be used for genome editing, as described herein. See also Fonfara et al. (2014) Nucleic Acids Res. 42(4):2577-90; Kapitonov et al. (2015) J. Bacterid. 198(5): 797-807, Shmakov et al. (2015) Mol. Cell. 397, and Chylinski et al. (2014) Nucleic Acids Res. 42(10):6091-6105); for sequence comparisons and a discussion of genetic diversity and phylogenetic analysis of Cas9.

[2771] The genomic target site will typically comprise a nucleotide sequence that is complementary to the gRNA and may further comprise a protospacer adjacent motif (PAM). In some embodiments, the target site comprises 20-30 base pairs in addition to a 3 or more base pair PAM. Typically, the first nucleotide of a PAM can be any nucleotide, while the two or more other nucleotides will depend on the specific Cas9 protein that is chosen. Exemplary PAM sequences are known to those of skill in the art and include, without limitation, NNG, NGN, NAG, and NGG, wherein N represents any nucleotide. In some embodiments, the allele targeted by a gRNA comprises a mutation that creates a PAM within the allele, wherein the PAM promotes binding of the Cas9-gRNA complex to the allele.

[2772] In some embodiments, the gRNA is 5-50 nucleotides, 10-30 nucleotides, 15-25 nucleotides, 18-22 nucleotides, or 19-21 nucleotides in length, or any length between the stated ranges, including, for example, 10, 11, 12, 13, 14, 15, 16, 17, 18, 19, 20, 21, 22, 23, 24, 25, 26, 27, 28, 29, 30, 31, 32, 33, 34, or 35 nucleotides in length. The guide RNA may be a single guide RNA comprising crRNA and tracrRNA sequences in a single RNA molecule, or the guide RNA may comprise two RNA molecules with crRNA and tracrRNA sequences residing in separate RNA molecules.

[2773] In another embodiment, the CRISPR nuclease from Prevotella and Francisella 1 (Cpfl, or Cas12a) is used. Cpfl is another class II CRISPR/Cas system RNA-guided nuclease with similarities to Cas9 and may be used analogously. Unlike Cas9, Cpfl does not require a tracrRNA and only depends on a crRNA in its guide RNA, which provides the advantage that shorter guide RNAs can be used with Cpfl for targeting than Cas9. Cpfl is capable of cleaving either DNA or RNA. The PAM sites recognized by Cpfl have the sequences 5′-YTN-3′ (where “Y” is a pyrimidine and “N” is any nucleobase) or 5′-TTN-3′, in contrast to the G-rich PAM site recognized by Cas9. Cpfl cleavage of DNA produces double-stranded breaks with a sticky-ends having a 4 or 5 nucleotide overhang. For a discussion of Cpfl, see, e.g., Ledford et al. (2015) Nature. 526 (7571):17-17, Zetsche et al. (2015) Cell. 163 (3):759-771, Murovec et al. (2017) Plant Biotechnol. J. 15(8):917-926, Zhang et al. (2017) Front. Plant Sci. 8:177, Fernandes et al. (2016) Postepy Biochem. 62(3):315-326; herein incorporated by reference.

[2774] C2cl (Cas12b) is another class II CRISPR/Cas system RNA-guided nuclease that may be used. C2cl, similarly to Cas9, depends on both a crRNA and tracrRNA for guidance to target sites. See, e.g., Shmakov et al. (2015) Mol Cell. 60(3):385-397, Zhang et al. (2017) Front Plant Sci. 8:177; herein incorporated by reference.

[2775] In yet another embodiment, an engineered RNA-guided Fokl nuclease may be used.

[2776] RNA-guided Fokl nucleases comprise fusions of inactive Cas9 (dCas9) and the Fokl endonuclease (Fokl-dCas9), wherein the dCas9 portion confers guide RNA-dependent targeting on Fokl. For a description of engineered RNA-guided Fold nucleases, see, e.g., Havlicek et al. (2017) Mol. Ther. 25(2):342-355, Pan et al. (2016) Sci Rep. 6:35794, Tsai et al. (2014) Nat Biotechnol. 32(6):569-576; herein incorporated by reference.

[2777] In other embodiments, any other Cas enzymes and variants described in other sections of the application (all incorporated herein) can be used similarly.

[2778] In some embodiments, the RNA-guided nuclease is provided in the form of a protein, optionally where the nuclease is complexed with a gRNA to form a ribonucleoprotein (RNP) complex. In some embodiments, the RNA-guided nuclease is provided by a nucleic acid encoding the RNA-guided nuclease, such as an RNA (e.g., messenger RNA) or DNA (expression vector). In some embodiments, the RNA-guided nuclease and the gRNA are both provided by vectors, such as the vectors and the vector system described in other parts of the application (all incorporated herein by reference). Both can be expressed by a single vector or separately on different vectors. The vectors encoding the RNA-guided nuclease and gRNA may be included in the vector system comprising the Cas12a editing system msr gene, msd gene and ret gene sequences. In some embodiments, the RNA-guided nuclease is fused to the RT and/or the msDNA.

[2779] The RNP complex may be administered to a subject or delivered into a cell by methods known in the art, such as those described in U.S. Pat. No. 11,390,884, which is incorporated by reference herein in its entirety. In some embodiments, the endonuclease/gRNA ribonucleoprotein (RNP) complexes are delivered to cells by electroporation. Direct delivery of the RNP complex to a subject or cell eliminates the need for expression from nucleic acids (e.g., transfection of plasmids encoding Cas9 and gRNA). It also eliminates unwanted integration of DNA segments derived from nucleic acid delivery (e.g., transfection of plasmids encoding Cas9 and gRNA). An endonuclease/gRNA ribonucleoprotein (RNP) complex usually is formed prior to administration.

[2780] Codon usage may be optimized to further improve production of an RNA-guided nuclease and/or reverse transcriptase (RT) in a particular cell or organism. For example, a nucleic acid encoding an RNA-guided nuclease or reverse transcriptase can be modified to substitute codons having a higher frequency of usage in a yeast cell, a bacterial cell, a human cell, a non-human cell, a mammalian cell, a rodent cell, a mouse cell, a rat cell, or any other host cell of interest, as compared to the naturally occurring polynucleotide sequence. When a nucleic acid encoding the RNA-guided nuclease or reverse transcriptase is introduced into cells, the protein can be transiently, conditionally, or constitutively expressed in the cell.

[2781] In some embodiments, the Cas12a editing system used for genome editing with nuclease genome editing systems can further include accessory or enhancer proteins for recombination. Examples of recombination enhancers can include nonhomologous end joining (NHEJ) inhibitors (e.g., inhibitor of DNA ligase IV, a KU inhibitor (e.g., KU70 or KU80), a DNA-PKc inhibitor, or an artemis inhibitor) and homologous directed repair (HDR) promoters, or both, that can enhance or improve more precise genome editing and/or the efficiency of homologous recombination. In some embodiments, the recombination accessory or enhancers can comprise C-terminal binding protein interacting protein (CtIP), cyclinB2, Rad family members (e.g. Rad50, Rad51, Rad52, etc).

[2782] CtIP is a transcription factor containing C2H2 zinc fingers that are involved in early steps of homologous recombination. Mammalian CtIP and its orthologs in other eukaryotes promote the resection of DNA double-strand breaks and are essential for meiotic recombination. HDR may be enhanced by using Cas9 nuclease associated (e.g. fused) to an N-terminal domain of CtIP, an approach that forces CtIP to the cleavage site and increases transgene integration by HDR. In some embodiments, an N-terminal fragment of CtIP, called HE for HDR enhancer, may be sufficient for HDR stimulation and requires the CtIP multimerization domain and CDK phosphorylation sites to be active. HDR stimulation by the Cas9-HE fusion depends on the guide RNA used, and therefore the guide RNA will be designed accordingly.

[2783] Using the gene editing system described herein, any target gene or sequence in a host cell can be edited or modified for a desired trait, including but not limited to: Myostatin (e.g., GDF8) to increase muscle growth; Pc POLLED to induce hairlessness; KISS1R to induce bore taint; Dead end protein (dnd) to induce sterility; Nano2 and DDX to induce sterility; CD163 to induce PRRSV resistance; RELA to induce ASFV resilience; CD18 to induce Mannheimia (Pasteurella) haemolytica resilience; NRAMP1 to induce tuberculosis resilience; Negative regulators of muscle mass (e.g., Myostatin) to increase muscle mass.

### Epigenetic Editing

[2784] In some embodiments, the Cas12a (or Cas Type V) gene editing systems described herein when including an epigenetic modifier domain can be used for genome editing at a desired site. Epigenetic modifications of DNA and histones are known for their multifaceted contributions to transcriptional regulation. As these modifications are faithfully propagated throughout DNA replication, they are considered central players in cellular memory of transcriptional states. Many efforts in the last decade have generated a vast understanding of individual epigenetic modifications and their contribution to transcriptional regulation. Epigenetic editing offers powerful tools to selectively induce epigenetic changes in a genome without altering the sequence of a nucleotide sequence as a means to regulate gene activity. The foundation of epigenetic editing is formed by the ability to generate fusion proteins of epigenetic enzymes or their catalytic domains with programmable DNA-binding platforms such as the clustered regularly interspaced short palindromic repeat (e.g., CRISPR Cas9 or Cas12a) to target these to an endogenous locus of choice. The enzymatic fusion protein then dictates the initial deposited modification while subsequent cross-talk within the local chromatin environment likely influences epigenetic and transcriptional output.

[2785] Accordingly, in one aspect, the disclosure provides an epigenetic gene editing system comprising one or more epigenetic enzymes or their catalytic domains combined with a Cas12a programmable nuclease, and an appropriate guide RNA for guiding the Cas12a to a particular target site. In some embodiments, the Cas12a may be fused to the epigenetic enzyme or a catalytic domain thereof. In other embodiments, the Cas12a and the epigenetic enzyme or catalytic domain thereof are not fused but may be co-delivered. In the latter embodiment, the epigenetic enzyme or catalytic domain there may include at targeting moiety to cause it to be co-localized with the Cas12a at the target site defined by the guide RNA.

[2786] Epigenetic enzymes include, but are not limited to DNA methyltransferases, histone methyltransferases, and histone deacetylases. In other embodiments, the epigenetic enzyme is histone deacetylase, histone deacetylase, histone methyl transferase, histone demethylase, DNA methyl transferase, DNA demethylase, DNA ligase, other ligases, ubiquitinase, ubiquitin ligase, phosphatase, or a phosphokinase.

[2787] In some embodiments, the DNA donor template has 10-100 or more bp of homologous nucleic acid sequence to the genome on both sides of the desired edit. The desired edit (insertion, deletion, or mutation) is in between the homologous sequence.

[2788] In still other embodiments, the LNPs may be used to deliver an epigenetic editing system. Epigenetic editors are generally composed of an epigenetic enzyme or their catalytic domain fused with a user-programmable DNA-binding protein, such as CRISPR Cas12a. The user-programmable DNA-binding protein (plus a guide RNA in the case of a nucleic acid programmable DNA binding protein) guides the epigenetic enzyme (e.g., a DNA methyltransferase or DNMT) to a specific site (e.g., a CpG island in a promoter region of a gene) in order to induce a change in promoter activity.

[2789] Epigenetic modifications of DNA and histones are known for their multifaceted contributions to transcriptional regulation. As these modifications are faithfully propagated throughout DNA replication, they are considered central players in cellular memory of transcriptional states. Many efforts in the last decade have generated a vast understanding of individual epigenetic modifications and their contribution to transcriptional regulation. Epigenetic editing offers powerful tools to selectively induce epigenetic changes in a genome without altering the sequence of a nucleotide sequence as a means to regulate gene activity. The foundation of epigenetic editing is formed by the ability to generate fusion proteins of epigenetic enzymes or their catalytic domains with programmable DNA-binding platforms such as the clustered regularly interspaced short palindromic repeat (e.g., CRISPR Cas9 or Cas12a) to target these to an endogenous locus of choice. The enzymatic fusion protein then dictates the initial deposited modification while subsequent cross-talk within the local chromatin environment likely influences epigenetic and transcriptional output.

[2790] The following published literature discussing epigenetic editing is incorporated herein by reference each in their entireties.
[2791] Gjaltema R A F, Rots M G. Advances of epigenetic editing. Curr Opin Chem Biol. 2020 August; 57:75-81. doi: 10.1016/j.cbpa.2020.04.020. Epub 2020 Jun. 30. PMID: 32619853. https://www.sciencedirect.com/science/article/pii/S1367593120300636?via%3Dihub
[2792] Kleinstiver B P, Sousa A A, Walton R T, Tak Y E, Hsu J Y, Clement K, Welch M M, Horng J E, Malagon-Lopez J, Scarfò I, Maus M V, Pinello L, Aryee M J, Joung J K. Engineered CRISPR-Cas12a variants with increased activities and improved targeting ranges for gene, epigenetic and base editing. Nat Biotechnol. 2019 March; 37(3):276-282. doi: 10.1038/s41587-018-0011-0. Epub 2019 Feb. 11. Erratum in: Nat Biotechnol. 2020 July; 38(7):901. PMID: 30742127; PMCID: PMC6401248. https://www.ncbi.nlm.nih.gov/pmc/articles/PMC6401248/
[2793] Rots M G, Jeltsch A. Editing the Epigenome: Overview, Open Questions, and Directions of Future Development. Methods Mol Biol. 2018; 1767:3-18. doi: 10.1007/978-1-4939-7774-1_1. PMID: 29524127.
[2794] Liu X S, Jaenisch R. Editing the Epigenome to Tackle Brain Disorders. Trends Neurosci. 2019 December; 42(12):861-870. doi: 10.1016/j.tins.2019.10.003. Epub 2019 Nov. 7. PMID: 31706628.
[2795] Waryah C B, Moses C, Arooj M, Blancafort P. Zinc Fingers, TALEs, and CRISPR Systems: A Comparison of Tools for Epigenome Editing. Methods Mol Biol. 2018; 1767:19-63. doi: 10.1007/978-1-4939-7774-1_2. PMID: 29524128.
[2796] Xu X, Hulshoff M S, Tan X, Zeisberg M, Zeisberg E M. CRISPR/Cas Derivatives as Novel Gene Modulating Tools: Possibilities and In Vivo Applications. Int J Mol Sci. 2020 Apr. 25; 21(9):3038. doi: 10.3390/ijms21093038. PMID: 32344896; PMCID: PMC7246536. https://www.ncbi.nlm.nih.gov/pmc/articles/PMC7246536/

[2797] In addition, the following published patent literature relating to epigenetic editing is incorporated herein by reference each in their entireties.

| Publication | |
|---|---|
| Number | Title |
| WO2023283359A2 | COMPOSITIONS AND METHODS FOR |
| | MODULATING SECRETED FRIZZLED |
| | RECEPTOR PROTEIN 1 (SFRP1) GENE |
| | EXPRESSION |
| WO2022226139A1 | TISSUE-SPECIFIC NUCLEIC ACID DELIVERY |
| | BY MIXED CATIONIC LIPID PARTICLES |
| WO2022132926A1 | TISSUE-SPECIFIC NUCLEIC ACID DELIVERY |
| | BY 1,2-DIOLEOYL-3-TRIMETHYL- |
| | AMMONIUM-PROPANE (DOTAP) LIPID |
| | NANOPARTICLES |
| WO2021183720A1 | COMPOSITIONS AND METHODS FOR |
| | MODULATING FORKHEAD BOX P3 (FOXP3) |
| | GENE EXPRESSION |
| WO2021061815A1 | COMPOSITIONS AND METHODS FOR |
| | MODULATING HEPATOCYTE NUCLEAR |
| | FACTOR 4-ALPHA (HNF4α) GENE |
| | EXPRESSION |
| WO2021061707A1 | COMPOSITIONS AND METHODS FOR |
| | MODULATING APOLIPOPROTEIN B (APOB) |
| | GENE EXPRESSION |
| WO2021061698A1 | METHODS AND COMPOSITIONS FOR |
| | MODULATING FRATAXIN EXPRESSION AND |
| | TREATING FRIEDRICH'S ATAXIA |

### Diseases and Disorders

[2798] Provided herein are methods of treating a disease or disorder, the methods comprising administering to a subject in need thereof a pharmaceutical composition of the present disclosure. In various embodiments of the invention, target genome or epigenetic modifications include cells with monogenic diseases or disorders. Various monogenic diseases include but are not limited to: Adenosine Deaminase (ADA) Deficiency; Alpha-1 Antitrypsin Deficiency; Cystic Fibrosis; Duchenne Muscular Dystrophy; Galactosemia; Hemochromatosis; Huntington's Disease; Maple Syrup Urine Disease; Marfan Syndrome; Neurofibromatosis Type 1; Pachyonychia Congenita; Phenylkeotnuria; Severe Combined Immunodeficiency; Sickle Cell Disease; Smith-Lemli-Opitz Syndrome; Tay-Sachs Disease; hereditary tyrosinemia I; Influenza; SARS-CoV-2; Alzheimer's disease; Parkinson's disease.

[2799] Target sequences related to certain diseases and disorders are known in some cases. Target sequences or target editing sites include disease-associated or causative mutations for one or more of 10,000 monogenic disorders. A list of target sequences can be generated based on the monogenic disorders. Common genetic disorders that may be correctable by the Cas12a (or Cas Type V) gene editing systems described here including but are not limited to: Adenosine Deaminase (ADA) Deficiency; Alpha-1 Antitrypsin Deficiency; Cystic Fibrosis; Duchenne Muscular Dystrophy; Galactosemia; Hemochromatosis; Huntington's Disease; Maple Syrup Urine Disease; Marfan Syndrome; Neurofibromatosis Type 1; Pachyonychia Congenita; Phenylkeotnuria; Severe Combined Immunodeficiency; Sickle Cell Disease; Smith-Lemli-Opitz Syndrome; and Tay-Sachs Disease. In other embodiments, the disease-associated gene can be associated with a polygenic disorder selected from the group consisting of: heart disease; high blood pressure; Alzheimer's disease; arthritis; diabetes; cancer; and obesity.

[2800] The Cas12a (or Cas Type V) gene editing systems disclosed herein may also be used to treat the following genetic disorders by editing a defect in the disease-associated gene, as follows:

| | Disease |
|---|---|
| Genetic disease | gene |
| Arenoleukodystrophy (ALD) | ABCD1 |
| Agammaglobulinemia non-Bruton type | IGHM |
| Alport syndrome | COL4A5 |
| Amyloid neuropathy - Andrade disease | TTR |
| Angioneurotic oedema | CINH |
| Alpha1-antitrypsin deficiency | SERPINEA 1 |
| Bartter syndrome type 4 | BSND |
| Blepharophimosis - ptosis - epicanthus | FOXL2 |
| inversus syndrome (BEPS) | |
| Brugada sindrome - Long QT syndrome-3 | SCN5A |
| Bruton agammaglobulinemia tyrosine kinase | BTK |
| Ceroid lipofuscinosis neuronal type 2 | CLN2 |
| Charcot Marie Tooth type 1A (CMT1A) | PMP22 |
| Charcot Marie Tooth type X (CMTX) | CMTX |
| Chronic granulomatous disease (CGD) | CYBB |
| Cystic Fibrosis (CF) | CFTR |
| Congenital adrenal hyperplasia (CAH) | CYP21A2 |
| Congenital disorder of glycosylation type Ia (CDG Ia) | PMM2 |
| Congenital fibrosis of extraocular muscles 1 (CFEOM1) | KIF21A |
| Crigler-Najjar syndrome | UGT1A1 |
| Deafness, autosomal recessive | CX26 |
| Diamond-Blackfan anemia (DBA) | RPS19 |
| Duchenne-Becker muscular dystrophy (DMD/DMB) | DMD |
| Duncan disease - X-linked lymphoproliferative | SH2D1A |
| syndrome (XLPD) | |
| Ectrodactyly ectodermal dysplasia and cleft lip/palate | p63 |
| syndrome (EEC) | |
| Epidermolysis bullosa dystrophica/pruriginosa | COL7A1 |
| Exostoses multiple type I (EXT1) | EXT1 |
| Exostoses multiple type II (EXT2) | EXT2 |
| Facioscapulohumeral muscular dystrophy | FRG1 |
| Factor VII deficiency | F7 |
| Familial Mediterranean Fever (FMF) | MEFV |
| Fanconi anemia A | FANCA |
| Fanconi anemia G | FANCG |
| Fragile-X | FRAXA |
| Gangliosidosis (GM1) | GLB1 |
| Gaucher disease (GD) | GBA |
| Glanzmann thrombasthenia | ITGA2B |
| Glucose-6-phosphate dehydrogenase deficiency | G6PD |
| Glutaric acidemia I | GCDH |
| Haemophilia A | F8 |
| Haemophilia B | F9 |
| Hand-foot-uterus syndrome | HOXD13 |
| Hemophagocytic lymphohistiocytosis familial, type 2 | PRF1 |
| (FHL2) | |
| Hypomagnesaemia primary | CLDN16 |
| HYPOPHOSPHATASIA | ALPL |
| Holt-Oram Sindrome (HOS) | TBX5 |
| Homocystinuria | MTHFR |
| Incontinentia pigmenti | NEMO |
| Lesch-Nyhan syndrome | HPRT |
| Limb-girdle muscular dystrophy type 2C (LGMD2C) | SGCG |
| Long QT syndrome-1 | KCNQ1 |
| Mannosidosis Alpha | MAN2B1 |
| Marfan syndrome | FBN1 |
| Methacrylic Aciduria, deficiency of beta- | HIBCH |
| hydroxyisobutyryl-CoA deacylase | |
| Mevalonic aciduria | MVK |
| Myotonic dystrophy (DM) | DMPK |
| Myotonic dystrophy type 2 (DM2) | ZNF9 |
| Mucopolysaccharidosis Type I - Hurler syndrome | IDUA |
| Mucopolysaccharidosis Type IIIA - Sanfilippo | SGSH |
| sindrome A (MPS3A) | |
| Mucopolysaccharidosis Type IIIB - Sanfilippo | NAGLU |
| sindrome B (MPS3B) | |
| Mucopolysaccharidosis Type VI (MPS VI) - Maroteaux- | ARSB |
| Lamy Syndrome | |
| Neuronal ceroid lipofuscinosis 1 - Batten's disease | PPT1 |
| (CLN1) | |
| Niemann-Pick disease | SMPD1 |
| Noonan sindrome | PTPN11 |
| Pancreatitis, hereditary (PCTT) | PRSS1 |
| Paramyotonia congenita (PMC) | SCN4A |
| Phenylketonuria | PAH |
| Polycystic kidney disease type 1 (PKD1) | PKD1 |
| Polycystic kidney disease type 2 (PKD2) | PKD2 |
| Polycystic kidney and hepatic disease-1 (ARPKD) | PKHD1 |
| Schwartz-Jampel/Stuve-Wiedemann syndrome | LIFR |
| Sickle cell anemia | HBB |
| Synpolydactyly (SPD1) | HOXA13 |
| Smith-Lemli-Opitz syndrome | DHCR7 |
| Spastic paraplegia type 3 | SPG3A |
| Spinal Muscular Atrophy (SMA) | SMN |
| Spinocerebellar ataxia 3 (SCA3) | ATXN3 |
| Spinocerebellar ataxia 7 (SCA7) | ATXN7 |
| Stargardt disease | ABCA4 |
| Tay Sachs (TSD) | HEXA |
| Thalassemia-α mental retardation syndrome | ATRX |
| Thalassemia-β | HBB |
| Torsion dystonia, early onset (EOTD) | DYT1 |
| Tyrosinaemia type 1 | FAH |
| Tuberosclerosis 1 | TSC1 |
| Tuberosclerosis 2 | TSC2 |
| Wiskott-Aldrich Sindrome (WAS) | WAS |

[2801] In addition, the Cas12a gene editing systems disclosed herein may also be used to treat the following genetic disorders by editing a defect in the disease-associated gene, or in more than one gene associated with a particular disorders, as follows:

| A | B | C | D | E | F |
|---|---|---|---|---|---|
| Genetic | Disease- | Most common | Encoded product | Accession | Type of |
| disease | associated genes | of (B) | of (C) | No. of (C) | product of (C) |
| Adrenal | CYP21A2 | CYP21A2 | Cytochrome P450 | P08686 | Enzyme |
| hyperplasia | | (196) | family 21 subfamily A | | |
| due to 21- | | | member 2 | | |
| hydroxylase | | | | | |
| deficiency | | | | | |
| (21-OHD | | | | | |
| CAH) | | | | | |
| Aicardi- | ADAR; | RNASEH2B | Ribonuclease H2 | Q5TBB1 | Enzyme |
| Goutières | IFIH1; | (28) | subunit B | | |
| syndrome | RNASEH2A; | | | | |
| encephalopathy | RNASEH2B; | | | | |
| | RNASEH2C; | | | | |
| | SAMHD1; | | | | |
| | TREX1 | | | | |
| Alpha-1- | SERPINA1 | SERPINA1 | Serpin family A | P01009 | Enzyme |
| antitrypsin | | (83) | member 1 | | inhibitor |
| (A1AT) | | | | | |
| deficiency | | | | | |
| (AATD) | | | | | |
| Arrhythmogenic | 13 different | PKP2 (138) | Plakophilin 2 | Q99959 | Adhesion |
| right | genes | | | | protein in |
| ventricular | linked to | | | | junctions and |
| cardiomyopa- | this disorder, | | | | intermediate |
| thy/dysplasia | so far. | | | | filaments. |
| (ARVC, | | | | | |
| ARVD) | | | | | |
| Autosomal | BICC1; | PKD1 (1154) | Polycystin 1 | P98161 | Subunit of ion |
| dominant | GANAB; | | | | channel |
| polycystic | PKD1; | | | | complex |
| kidney | PKD2 | | | | |
| disease | | | | | |
| (ADPKD) | | | | | |
| Brugada | 22 different | SCN5A (725) | Sodium voltage-gated | Q14524 | Ion channel |
| syndrome | genes | | channel alpha subunit | | |
| ventricular | linked to | | 5 | | |
| fibrillation | this disorder, | | | | |
| | so far | | | | |
| Catecholaminergic | CALM1; | RYR2 (288) | Ryanodine receptor 2 | Q92736 | Ion channel |
| polymorphic | CALM2; | | | | |
| ventricular | CALM3; | | | | |
| tachycardia | CASQ2; | | | | |
| (CPVT) | RYR2; | | | | |
| | TECRL; | | | | |
| | TRDN | | | | |
| Charcot- | 75 different | PMP22 (63) | Peripheral myelin | Q01453 | Ill-defined |
| Marie- | genes | | protein 224 | | role in myelin |
| Tooth^{d} dis- | linked to | | | | and Schwann |
| ease/Hereditary | this disorder, | | | | cells |
| motor and | so far. | | | | |
| sensory | | | | | |
| neuropathy | | | | | |
| Congenital | CYP11B1; | CYP21A2 | Cytochrome P450 | P08686 | Enzyme |
| adrenal | CYP17A1; | (214) | family 21 subfamily A | | |
| hyperplasia | CYP21A2; | | member 2 | | |
| (CAH) | HSD3B2; | | | | |
| | POR; | | | | |
| | STAR | | | | |
| Congenital | SI | SI (23) | Sucrase-isomaltase | P14410 | Enzyme |
| sucrase- | | | | | |
| isomaltase | | | | | |
| deficiency | | | | | |
| (CSID) | | | | | |
| Congenital | CFTR; | CFTR (120) | Cystic fibrosis | Q20BH0 | Ion channel |
| bilateral | ADGRG2 | | transmembrane | | |
| absence of | | | conductance regulator | | |
| vas deferens | | | | | |
| Cystic | CFTR; | CFTR (1053) | Cystic fibrosis | Q20BH0 | Ion channel |
| fibrosis | CLCA4; | | transmembrane | | |
| | DCTN4; | | conductance regulator | | |
| | STX1A; | | | | |
| | TGFB1 | | | | |
| Cystinuria- | SLC3A1; | SLC7A9 (83) | Solute carrier family 7 | P82251 | Membrane |
| lysinuria syn- | SLC7A9 | | member 9 | | transporter |
| drome/Cystinuria | | | | | |
| Cytomegalic | NR0B1 | NR0B1 (112) | Nuclear receptor | P51843 | Nuclear |
| congenital | | | subfamily 0 group B | | receptor |
| adrenal | | | member 1 | | |
| hypoplasia | | | | | |
| (AHC) | | | | | |
| (subtype of | | | | | |
| congenital | | | | | |
| adrenal | | | | | |
| hypoplasia) | | | | | |
| Dentinogenes | DSPP | DSPP (11) | Dentin sialophospho- | Q9NZW4 | Seeds |
| is imperfecta | | | protein | | biomineral- |
| (DGI) (all | | | | | ization, |
| types) | | | | | Dentinogenesis |
| Duchenne | DMD; | DMD (830) | Dystrophin | P11532 | Structural |
| muscular | LTBP4 | | | | protein |
| dystrophy | | | | | |
| (DMD) | | | | | |
| Dysbetalipo- | APOE | APOE (42) | Apolipoprotein E | P02649 | Lipid carrier, |
| proteinemia/Hyper- | | | | | lipoprotein |
| liproteinemia | | | | | |
| type 3 | | | | | |
| Ehlers- | COL1A1; | COL5A1 | Collagen type V alpha | P20908, | Structural |
| Danlos | COL5A1; | (106) | 1 chain, collagen type | P05997 | protein |
| syndrome | COL5A2 | | V alpha 2 chain | | |
| Familial | APC; | APC (539) | Adenomatous | P25054 | Tumor |
| adenomatous | MUTYH | | polyposis coli protein | | suppressor, |
| polyposis | | | | | regulatory |
| (FAP) | | | | | protein |
| Gardner | APC | APC (539) | Adenomatous | P25054 | Tumor |
| syndrome | | | polyposis coli protein | | suppressor, |
| (subtype of | | | | | associated |
| familial | | | | | with |
| adenomatous | | | | | microtublules |
| polyposis) | | | | | |
| Familial | CCM2; | KRIT1 (80) | Krev interaction | O00522 | Regulatory |
| cerebral | KRIT1; | | trapped protein 1 | | protein |
| cavernous | PDCD10 | | | | |
| malformation | | | | | |
| Familial | CASR | CASR (373) | Calcium sensing | P41180 | G protein- |
| hypocalciuric | | | receptor | | coupled |
| hypercalcemia | | | | | receptor |
| type 1 | | | | | |
| (FHH) | | | | | |
| Famililal | APOB; | LDLR (1254) | Low density | P01130 | Lipoprotein |
| hypercholester- | LDLR; | | lipoprotein receptor | | receptor |
| olemia | LDLRAP1; | | | | |
| | PCSK | | | | |
| Familial | 45 different | TTN (672) | Titin | Q8WZ42 | Muscle |
| isolated | genes | | | | protein |
| dilated | linked to | | | | |
| cardiomyopathy | this disorder, | | | | |
| | so far. | | | | |
| Familial long | 19 different | KCNQ1 (448) | Potassium voltage- | P51787 | Ion Channel |
| QT syndrome | genes | | gated channel | | |
| (LQTS), | linked to | | subfamily Q member | | |
| including | this disorder, | | 1 | | |
| Romano- | so far. | | | | |
| Ward | | | | | |
| syndrome | | | | | |
| Fragile X | FMR1 | FMR1 (7) | Fragile X mental | Q06787 | Regulator of |
| syndrome/Martin- | | | retardation 1 | | mRNA |
| bell syndrome | | | | | biology |
| Glucose-6- | G6PD | G6PD (218) | Glucose-6-phosphate | P11413 | Enzyme |
| phosphate | | | 1 dehydrogenase | | |
| dehydrogenase | | | | | |
| deficiency | | | | | |
| Glycogen | 27 different | AGL (117) | Glycogen debranching | P35573 | Enzyme |
| storage | genes | | enzyme | | |
| disease | linked to | | | | |
| | this disorder, | | | | |
| | so far. | | | | |
| GM2 | GM2A; | HEXA (124) | Hexosaminidase | P06865 | Enzyme |
| gangliosidosis | HEXA; | | subunit alpha | | |
| | HEXB | | | | |
| Hemochromatosis | BMP6; | HFE (43) | Hereditary | Q30201 | Binds |
| | HAMP; | | hemochromatosis | | transferrin |
| | HFE; HJV; | | protein | | receptor |
| | SLC40A1; | | | | |
| | TFR2 | | | | |
| Hemolytic | PKLR | PKLR (237) | Pyruvate kinase | P30613 | Enzyme |
| anemia due | | | | | |
| to red cell | | | | | |
| pyruvate | | | | | |
| kinase | | | | | |
| deficiency | | | | | |
| Hemophilia | F8; F9 | F8 (1898) | Coagulation factor | P00451 | Cofactor for |
| A and B | | | VIII | | factor IXa |
| Hemophilia | F8 | F8 (3364) | Coagulation factor | P00451 | Cofactor for |
| A | | | VIII | | factor IXa |
| Hemorrhagic | ACVRL1; | ENG (187) | Endoglin | P17813 | Regulation of |
| telangiec- | ENG; | | | | angiogenesis |
| tasia/Osler | GDF2; | | | | |
| Weder Rendu | SMAD4 | | | | |
| disease | | | | | |
| Hereditary | ANGPT1; | SERPING1 | Serpin family G | P05155 | Enzyme |
| angioedema | F12; PLG; | (252) | member 1 | | inhibitor |
| (HAE)/Angio | SERPING1 | | | | |
| neurotic | | | | | |
| edema | | | | | |
| Hereditary | 14 different | BRCA1 | Breast cancer type 1 | P38398 | E3 ubiquitin- |
| breast and | genes | (1262) | susceptibility protein | | protein ligase |
| ovarian | linked to | | | | |
| cancer | this disorder | | | | |
| syndrome | so far. | | | | |
| Hereditary | ALDOB | ALDOB (32) | Aldolase, fructose- | P05062 | Enzyme |
| fructose intoler- | | | bisphosphate B | | |
| ance/Fructosemia | | | | | |
| Hereditary | MOCOS; | MOCOS (8); | Molybdenum cofactor | Q9C5X8, | Enzymes |
| xanthinuria/Xan- | XDH | XDH (17) | sulfurase, xanthine | P47989 | |
| thine stone | | | dehydrogenase | | |
| disease | | | | | |
| Hypohidrotic | 10 different | EDA (199) | Ectodysplasin A | Q92838 | Cytokine |
| ectodermal | genes | | | | |
| dysplasia | linked to | | | | |
| (HED) | this disorder, | | | | |
| | so far. | | | | |
| Iminoglycinuria | SLC36A2; | SLC36A2 (1) | Solute carrier family | Q495M3 | Membrane |
| | SLC6A18; | | 36 member 2 | | transporter |
| | SLC6A19; | | | | |
| | SLC6A20 | | | | |
| Li-Fraumeni | CDKN2A; | TP53 (417) | Tumor protein p53 | P04637 | Tumor |
| syndrome | CHEK2; | | | | suppressor, |
| sarcoma, | MDM2; | | | | gene |
| breast, | TP53 | | | | regulation |
| leukemia, | | | | | |
| and adrenal | | | | | |
| gland | | | | | |
| (SBLA) | | | | | |
| syndrome | | | | | |
| Long chain 3- | HADHA | HADHA (35) | Hydroxyacyl-CoA | P40939 | Enzyme |
| hydroxyacyl- | | | dehydrogenase | | |
| CoA | | | trifunctional | | |
| dehydrogenase | | | multienzyme complex | | |
| deficiency | | | subunit alpha | | |
| (LCHAD) | | | | | |
| Lynch | 11 different | MSH2 (34) | DNA mismatch repair | P43246 | DNA repair, |
| syndrome | genes | | protein Msh2 | | binds DNA, |
| | linked to | | | | ATPase |
| | this disorder | | | | |
| | so far | | | | |
| Marfan | FBN1; | FBN1 (1893) | Fibrillin 1 | P35555 | Structural |
| syndrome | TGFBR2 | | | | protein, |
| | | | | | extracellular |
| | | | | | matrix |
| Maternal phenyl- | PAH | PAH (690) | Phenylalanine | P00439 | Enzyme |
| ketonuria/Phenyl- | | | hydroxylase | | |
| ketonuric | | | | | |
| embryopathy | | | | | |
| Medium | ACADM | ACADM | Acyl-CoA | P11310 | Enzyme |
| chain acyl- | | (136) | dehydrogenase | | |
| CoA | | | medium chain | | |
| dehydrogenase | | | | | |
| deficiency | | | | | |
| (MCADD) | | | | | |
| Mucolipidosis | GNPTAB | GNPTAB (68) | N-acetylglucosamine | Q3T906 | Enzyme |
| type III | | | 1 phosphate | | |
| (ML3) | | | transferase, Subunits | | |
| alpha/beta | | | alpha and beta | | |
| Mucopolysac- | GALNS | GALNS (269) | Galactosamine (N- | P34059 | Enzyme |
| charidosis | | | acetyl)-6-sulfatase | | |
| type 4A | | | | | |
| (MPS4A)/Morquio | | | | | |
| disease type | | | | | |
| A | | | | | |
| Multiple | RET | RET (130) | Ret proto-oncogene | P07949 | Receptor |
| endocrine | | | receptor tyrosine | | tyrosine |
| neoplasia | | | kinase | | kinase |
| type 2 | | | | | |
| Multiple | COL2A1; | COMP (155) | Cartilage oligomeric | P49747 | Structural |
| epiphyseal | COL9A1; | | matrix protein | | protein |
| dysplasia | COL9A2; | | | | |
| (MED) | COL9A3/collagen | | | | |
| | type IX | | | | |
| | alpha 3 | | | | |
| | chain; | | | | |
| | COMP; | | | | |
| | KIF7; | | | | |
| | MATN3; | | | | |
| | SLC26A2 | | | | |
| Neurofibromatosis | NF1 | NF1 (1208) | Neurofibromin 1 | P21359 | Regulator of |
| type 1 (NF1)/Von | | | | | Ras GTPase |
| Recklinghausen | | | | | activity |
| disease | | | | | |
| Oculocutaneous | LRMDA; | TYR (352) | Tyrosinase | P14679 | Enzyme |
| albinism | MC1R; | | | | |
| (OCA) | OCA2; | | | | |
| | SLC24A5; | | | | |
| | SLC45A2; | | | | |
| | TYR; | | | | |
| | TYRP1 | | | | |
| Osteogenesis | 15 different | COL1A1 | Collagen type I alpha | P02452, | Structural |
| imperfecta/brittle | genes | (547); | 1 chain, collagen type | P08123 | protein |
| bone disease | linked to | COL1A2 | I alpha 2 chain | | |
| | this disorder, | (466) | | | |
| | so far. | | | | |
| Pendred | FOXI1; | SLC26A4 | Solute carrier family | O43511 | Membrane |
| syndrome | KCNJ10; | (404) | 26 member 4 | | transporter |
| (PDS)/Deafness | SLC26A4 | | | | |
| with goiter | | | | | |
| Phenylketonuria | PAH | PAH (690) | Phenylalanine | P00439 | Enzyme |
| (PKU)/Phenyl- | | | hydroxylase | | |
| alanine | | | | | |
| hydroxylase | | | | | |
| deficiency | | | | | |
| (PAH | | | | | |
| deficiency) | | | | | |
| Proximal | NAIP; | SMN1 (47) | Survival motor neuron | Q16637 | RNA splicing |
| spinal | SMN1; | | protein | | |
| muscular | SMN2 | | | | |
| atrophy | | | | | |
| (SMA) | | | | | |
| Retinitis | 82 different | RHO (204) | Rhodopsin | P08100 | G-protein |
| Pigmentosa | genes | | | | coupled |
| (RP) | linked to | | | | receptor |
| | this disorder, | | | | |
| | so far. | | | | |
| Recessive X- | STS | STS (28) | Steroid sulfatase | P08842 | Enzyme |
| linked | | | | | |
| ichthyosis | | | | | |
| (XLI) | | | | | |
| Retinoblastoma | NMYC; | RB1 (292) | RB transcriptional | P06400 | Tumor |
| (RB bilateral | RB1 | | corepressor 1 | | suppressor, |
| (40% of cases) | | | | | cell cycle |
| and unilateral | | | | | regulation |
| (60% of | | | | | |
| cases-denovo | | | | | |
| mutation) | | | | | |
| Rett | MECP2 | MECP2 (246) | Methyl-CpG binding | P51608 | Binds to |
| syndrome | | | protein 2 | | methylated |
| | | | | | DNA, gene |
| | | | | | regulation |
| Sickle cell | HBB | HBB (433) | Hemoglobin subunit | P68871 | Oxygen |
| anemia | | | beta | | carrier |
| Sotos | APC2; | NSD1 (228) | Nuclear receptor | Q96L73 | Enzyme |
| syndrome/cerebral | NSD1; | | binding SET domain | | |
| gigantism | SETD2 | | protein 1 | | |
| Stargardt | ABCA4; | ABCA4 (789) | ATP binding cassette | P78363 | Membrane |
| disease/Fundus | CNGB3; | | subfamily A member | | transporter |
| flavimaculatus | ELOVL4; | | 4 | | |
| | PROM1; | | | | |
| | PRPH2 | | | | |
| Stickler | COL11A1; | COL2A1 | Collagen type II alpha | P02458 | Structural |
| syndrome/hereditary | COL2A1; | (335) | 1 chain | | protein |
| progressive arthro- | COL11A2; | | | | |
| ophthalmopathy | COL9A1; | | | | |
| | COL9A2; | | | | |
| | COL9A3; | | | | |
| | LOXL3 | | | | |
| Supravalvular | ELN | ELN (25) | Elastin | P15502 | Structural |
| aortic | | | | | protien |
| stenosis | | | | | |
| (SVAS) | | | | | |
| β- | HBB | HBB (434) | Hemoglobin B chain | P68871 | Oxygen |
| Thalassemia | | | | | carrier |
| Tibial | TTN | TTN (53) | Titin | Q8WZ42 | Muscle |
| muscular | | | | | protein |
| dystrophy/Upp | | | | | |
| myopathy | | | | | |
| Tuberous | TSC1; | TSC2 (518) | Tuberin | P49815 | Tumor |
| sclerosis com- | TSC2 | | | | suppressor, |
| plex/Bourneville | | | | | Regulation of |
| syndrome | | | | | mTORC1 |
| | | | | | signaling |
| Von-Hippel | VHL | VHL (218) | Von Hippel-Lindau | P40337 | Tumor |
| Lindau | | | tumor suppressor | | suppressor, |
| disease | | | | | role in E3 |
| | | | | | ubiquitin |
| | | | | | ligase |
| | | | | | complex |
| Von | VWF | VWF (636) | Von Willebrand factor | P04275 | Collagen |
| Willebrand | | | | | binding, |
| disease | | | | | chaperone for |
| | | | | | coagulation |
| | | | | | factor VIII |
| X-linked | ABCD1 | ABCD1 (425) | ATP binding cassette | P33897 | Membrane |
| adreno- | | | subfamily D member | | transporter |
| leukodystrophy | | | 1 | | |
| (ALD) | | | | | |
| X-linked | RS1 | | | | |
| retinoschisis | | | | | |
| (XLRS) | | | | | |

[2802] Accordingly, to treat one or more such diseases or disorders, in various aspects of the invention, one or more targeted polynucleotide sequence related to certain diseases and disorders, e.g., a genetic mutation, is contacted by a Cas12a gene editing system disclosed herein; and a guide RNA, wherein the guide RNA comprises a complementary sequence to that of a targeted polynucleotide sequence.

[2803] In some embodiments, the guide RNA directs the Cas12a polypeptide to the target site or the targeted polynucleotide sequence; and optionally forms a ribonucleoprotein complex with the polypeptide and the guide RNA.

[2804] Additional therapeutic applications for the Cas12a genome editing systems disclosed herein include base editing, prime editing, gene insertions and/or deletions.

[2805] Diagnostic applications for the Cas12a genome editing system include probes, diagnostics, theranostics.

[2806] The Cas12a editing system comprising the heterologous nucleic acid sequence can be used in a variety of applications, several non-limiting examples of which are described herein. In general, the Cas12a editing system can be used in any suitable organism. In some embodiments, the organism is a eukaryote.

[2807] In some embodiments, the organism is an animal. In some embodiments, the animal is a fish, an amphibian, a reptile, a mammal, or a bird. In some embodiments, the animal is a farm animal or agriculture animal. Non-limiting examples of farm and agriculture animals include horses, goats, sheep, swine, cattle, llamas, alpacas, and birds, e.g., chickens, turkeys, ducks, and geese. In some embodiments, the animal is a non-human primate, e.g., baboons, capuchin monkeys, chimpanzees, lemurs, macaques, marmosets, tamarins, spider monkeys, squirrel monkeys, and vervet monkeys. In some embodiments, the animal is a pet. Non-limiting examples of pets include dogs, cats, horses, rabbits, ferrets, gerbils, hamsters, chinchillas, fancy rats, guinea pigs, canaries, parakeets, and parrots.

[2808] In some embodiments, the organism is a plant. Plants that may be transfected with an Cas12a editing system include monocots and dicots. Particular examples include, but are not limited to, corn (maize), sorghum, wheat, sunflower, potato, cotton, rice, soybean, sugarbeet, sugarcane, tobacco, barley, and oilseed rape, Brassica sp., alfalfa, rye, millet, safflower, peanuts, sweet potato, cassava, coffee, coconut, pineapple, citrus trees, cocoa, tea, banana, avocado, fig, guava, mango, olive, papaya, cashew, macadamia, almond, oats, vegetables, ornamentals, and conifers. Vegetables include, but are not limited to, crucifers, peppers, tomatoes, lettuce, green beans, lima beans, peas, and members of the genus Cucumis such as cucumber, cantaloupe, and musk melon. Ornamentals include, but are not limited to, azalea, hydrangea, hibiscus, roses, tulips, daffodils, petunias, carnation, poinsettia, and chrysanthemum.

[2809] In some embodiments, heterologous nucleic acid sequences can be added to the subject Cas12a editing system to provide a cell with a heterologous nucleic acid encoding a protein or regulatory RNA of interest, a cellular barcode, a donor polynucleotide suitable for use in gene editing, e.g., by homology directed repair (HDR) or recombination-mediated genetic engineering (recombineering), or a CRISPR protospacer DNA sequence for use in molecular recording, as discussed further below. In embodiments relating to Cas12a retron-based gene editing systems, uch heterologous sequences may be inserted, for example, into the msr locus or the msd locus such that the heterologous sequence is transcribed by the retron reverse transcriptase as part of the msDNA product.

[2810] In some embodiments, the Cas12a editing systems described herein may be used for research tools, such as kits, functional genomics assays, and generating engineered cell lines and animal models for research and drug screening. The kit may comprise one or more reagents in addition to the Cas12a editing system, such as a buffer, a control reagent, a control vector, a control RNA polynucleotide, a reagent for in vitro production of the polypeptide from DNA, and adaptors for sequencing. A buffer can be, for example, a stabilization buffer, a reconstituting buffer, a diluting buffer, a wash buffer, or a buffer for introducing a polypeptide and/or polynucleotide of the kit into a cell. In some instances, a kit can comprise one or more additional reagents specific for plants. One or more additional reagents for plants can include, for example, soil, nutrients, plants, seeds, spores, Agrobacterium, a T-DNA vector, and a pBINAR vector.

### Production of Protein or RNA

[2811] In some embodiments, the Cas12a (Cas Type V) gene editing systems may comprise one or more additional proteins (e.g., an accessory protein, such as a recombinase) or RNA molecules (e.g., a donor template), or a nucleotide sequence encoding the one or more additional proteins or RNA molecules.

[2812] In some embodiments, Cas12a gene editing systems may comprise a nucleic acid molecule encoding a polypeptide of interest. The polypeptide of interest may be any type of protein/peptide including, without limitation, an enzyme, an extracellular matrix protein, a receptor, transporter, ion channel, or other membrane protein, a hormone, a neuropeptide, an antibody, or a cytoskeletal protein, a functional fragment thereof, or a biologically active domain of interest. In some embodiments, the protein is a therapeutic protein, therapeutic antibody for use in treatment of a disease, or a template to fix a mutation or mutated exon in the genome. In other embodiments, the polypeptide of interest is a gene editing accessory protein, e.g., recombinases, invertases, nucleases, polymerases, ligases, deaminases, reverse transcriptases, or epigenetic modifying functions. The polypeptide of interest, e.g., recombinases, invertases, nucleases, polymerases, ligases, deaminases, reverse transcriptases, or epigenetic modifying functions, could be fused to the Cas12a gene editing system or a component thereof (e.g., fused to the Cas12a nuclease).

[2813] In other embodiments, the Cas12a gene editing system could also be engineered to include a DNA template.

[2814] In still other embodiments, the Cas12a gene editing system could also include a least one additional nucleic acid molecule for modulating a target in the cell, e.g., without limitation, a RNA interference (RNAi) nucleic acid or regulatory RNA such as, but not limited to, a microRNA (miRNA), a small interfering RNA (siRNA), a short hairpin RNA (shRNA), a small nuclear RNA (snRNA), a long non-coding RNA (lncRNA), an antisense nucleic acid, and the like.

### Recombineering

[2815] Recombineering (recombination-mediated genetic engineering) can be used in modifying chromosomal as well as episomal replicons in cells, for example, to create gene replacements, gene knockouts, deletions, insertions, inversions, or point mutations. Recombineering can also be used to modify a plasmid or bacterial artificial chromosome (BAC), for example, to clone a gene or insert markers or tags.

[2816] The Cas12a (Cas Type V) editing systems described herein can be used in recombineering applications to provide linear single-stranded or double-stranded DNA for recombination. Homologous recombination may be mediated by bacteriophage proteins such as RecE/RecT from Rac prophage or Redobd from bacteriophage lambda. The linear DNA should have sufficient homology at the 5′ and 3′ ends to a target DNA molecule present in a cell (e.g., plasmid, BAC, or chromosome) to allow recombination.

[2817] The linear double-stranded or single-stranded DNA molecule used in recombineering (i.e. donor polynucleotide) comprises a sequence having the intended edit to be inserted flanked by two homology arms that target the linear DNA molecule to a target site for homologous recombination. Homology arms for recombineering typically range in length from 13-300 nucleotides, or 20 to 200 nucleotides, including any length within this range such as 13, 14, 15, 16, 17, 18, 19, 20, 22, 24, 26, 28, 30, 32, 34, 36, 38, 40, 42, 44, 46, 48, 50, 55, 60, 65, 70, 75, 80, 85, 90, 95, 100, 105, 110, 115, 120, 125, 130, 135, 140, 145, 150, 155, 160, 165, 170, 175, 180, 185, 190, 195, or 200 nucleotides in length. In some embodiments, a homology arm is at least 15, at least 20, at least 30, at least 40, or at least 50 or more nucleotides in length. Homology arms ranging from 40-50 nucleotides in length generally have sufficient targeting efficiency for recombination; however, longer homology arms ranging from 150 to 200 bases or more may further improve targeting efficiency. In some embodiments, the 5′ homology arm and the 3′ homology arm differ in length. For example, the linear DNA may have about 50 bases at the 5′ end and about 20 bases at the 3′ end with homology to the region to be targeted.

[2818] The bacteriophage homologous recombination proteins can be provided to a cell as proteins or by one or more vectors encoding the recombination proteins, such as the vector or vector system. In some embodiments, one or more vectors encoding the bacteriophage recombination proteins are included in the vector system comprising the Cas12a editing system msr gene, msd gene, and/or ret gene sequences. Additionally, a number of bacterial strains containing prophage recombination systems are available for recombineering, including, without limitation, DY380, containing a defective 1 prophage with recombination proteins exo, bet, and gam; EL250, derived from DY380, which in addition to the recombination genes found in DY380, also contains a tightly controlled arabinose-inducible flpe gene (flpe mediates recombination between two identical frt sites); EL350, also derived from DY380, which in addition to the recombination genes found in DY380, also contains a tightly controlled arabinose-inducible ere gene (ere mediates recombination between two identical loxP sites; SW102, derived from DY380, which is designed for BAC recombineering using a galK positive/negative selection; SW105, derived from EL250, which can also be used for galK positive/negative selection, but like EL250, contain an ara-inducible Flpe gene; and SW106, derived from EL350, which can be used for galK positive/negative selection, but like EL350, contains an ara-inducible Cre gene. Recombineering can be carried out by transfecting bacterial cells of such strains with an Cas12a editing system comprising a heterologous sequence encoding a linear DNA suitable for recombineering. For a discussion of recombineering systems and protocols, see, e.g., Sharan et al. (2009) Nat Protoc. 4(2): 206-223, Zhang et al. (1998) Nature Genetics 20: 123-128, Muyrers et al. (1999) Nucleic Acids Res. 27: 1555-1557, Yu et al. (2000) Proc. Natl. Acad. Sci U.S.A. 97 (11):5978-5983; herein incorporated by reference.

### Molecular Recording

[2819] In some embodiments, the Cas12a (Cas Type V) editing system comprises a synthetic CRISPR protospacer DNA sequence to allow molecular recording. The endogenous CRISPR Cas1-Cas2 system is normally utilized by bacteria and archaea to keep track of foreign DNA sequences originating from viral infections by storing short sequences (i.e., protospacers) that confer sequence-specific resistance to invading viral nucleic acids within genome-based arrays. These arrays not only preserve the spacer sequences but also record the order in which the sequences are acquired, generating a temporal record of acquisition events.

[2820] This system can be adapted to record arbitrary DNA sequences into a genomic CRISPR array in the form of “synthetic protospacers” that are introduced into cells using Cas12a editing systems. Cas12a editing systems carrying the protospacer sequences can be used for integration of synthetic CRISPR protospacer sequences at a specific genomic locus by utilizing the CRISPR system Cas1-Cas2 complex. Molecular recording can be used to keep track of certain biological events by producing a stable genetic memory tracking code. See, e.g., Shipman et al. (2016) Science 353(6298): aafl 175 and International Patent Application Publication No. WO/2018/191525; herein incorporated by reference in their entireties.

[2821] In some embodiments, the CRISPR-Cas system is harnessed to record specific and arbitrary DNA sequences into a bacterial genome. The DNA sequences can be produced by an Cas12a editing system within the cell. For example, the Cas12a editing system can be used to produce the protospacers within the cell, which are inserted into a CRISPR array within the cell. The cell may be modified to include one or more engineered returns (or vector systems encoding them) that can produce one or more synthetic protospacers in the cell, wherein the synthetic protospacers are added to the CRISPR array. A record of defined sequences, recorded over many days, and in multiple modalities can be generated.

[2822] In some embodiments, the Cas12a editing system comprises an msd protospacer nucleic acid region or an msr protospacer nucleic acid region. In the case of a msr protospacer nucleic acid region, the protospacer sequence is first incorporated into the msr RNA, which is reverse transcribed into protospacer DNA. Double stranded protospacer DNA is produced when two complementary protospacer DNA sequences having complementary sequences hybridize, or when a double-stranded structure (such as a hairpin) is formed in a single stranded protospacer DNA (e.g., a single msDNA can form an appropriate hairpin structure to provide the double stranded DNA protospacer).

[2823] In some embodiments, a single stranded DNA produced in vivo from a first Cas12a editing system may be hybridized with a complementary single-stranded DNA produced in vivo from the same retron or a second Cas12a editing system or may form a hairpin structure and then used as a protospacer sequence to be inserted into a CRISPR array as a spacer sequence. The Cas12a editing system(s) should provide sufficient levels of the protospacer sequence within a cell for incorporation into the CRISPR array. The use of protospacers generated within the cell extends the in vivo molecular recording system from only capturing information known to a user, to capturing biological or environmental information that may be previously unknown to a user. For example, an msDNA protospacer sequence in an Cas12a editing system construct may be driven by a promoter that is downstream of a sensor pathway for a biological phenomenon or environmental toxin. The capture and storage of the protospacer sequence in the CRISPR array records the event. If multiple msDNA protospacers are driven by different promoters, the activity of those promoters is recorded (along with anything that may be upstream of the promoters) as well as the relative order of promoter activity (based on the relative position of spacer sequences in the CRISPR array). At any point after the recording has taken place, the CRISPR array may be sequenced to determine whether a given biological or environmental event has taken place and the order of multiple events, given by the presence and relative position of msDNA-derived spacers in the CRISPR array.

[2824] In some embodiments, the synthetic protospacer further comprises an AAG PAM sequence at its 5′ end. Protospacers including the 5′ AAG PAM are acquired by the CRISPR array with greater efficiency than those that do not include a PAM sequence.

[2825] In some embodiments, Cas1 and Cas2 are provided by a vector that expresses the Cas1 and Cas2 at a level sufficient to allow the synthetic protospacer sequences produced by Cas12a editing systems to be acquired by a CRISPR array in a cell. Such a vector system can be used to allow molecular recording in a cell that lacks endogenous Cas proteins.

### Therapeutic Applications

[2826] Also provided herein are methods of diagnosing, prognosing, treating, and/or preventing a disease, state, or condition in or of a subject, using the Cas12a (Cas Type V) editing system of the invention.

[2827] Generally, the methods of diagnosing, prognosing, treating, and/or preventing a disease, state, or condition in or of a subject can include modifying a polynucleotide in a subject or cell thereof using a composition, system, or component thereof of the Cas12a editing system as described herein, and/or include detecting a diseased or healthy polynucleotide in a subject or cell thereof using a composition, system, or component thereof of the Cas12a editing system as described herein.

[2828] In some embodiments, the method of treatment or prevention can include using a composition, system, or component of the Cas12a editing system to modify a polynucleotide of an infectious organism (e.g. bacterial or virus) within a subject or cell thereof.

[2829] In some embodiments, the method of treatment or prevention can include using a composition, system, or component of the Cas12a editing system to modify a polynucleotide of an infectious organism or symbiotic organism within a subject.

[2830] In some embodiments, the composition, system, and components of the Cas12a editing system can be used to develop models of diseases, states, or conditions.

[2831] In some embodiments, the composition, system, and components of the Cas12a editing system can be used to detect a disease state or correction thereof, such as by a method of treatment or prevention described herein.

[2832] In some embodiments, the composition, system, and components of the Cas12a editing system can be used to screen and select cells that can be used, for example, as treatments or preventions described herein.

[2833] In some embodiments, the composition, system, and components thereof can be used to develop biologically active agents that can be used to modify one or more biologic functions or activities in a subject or a cell thereof.

[2834] In general, the method can include delivering a composition, system, and/or component of the Cas12a editing system to a subject or cell thereof, or to an infectious or symbiotic organism by a suitable delivery technique and/or composition. Once administered, the components can operate as described elsewhere herein to elicit a nucleic acid modification event. In some embodiments, the nucleic acid modification event can occur at the genomic, epigenomic, and/or transcriptomic level. DNA and/or RNA cleavage, gene activation, and/or gene deactivation can occur.

[2835] The composition, system, and components of the Cas12a editing system as described elsewhere herein can be used to treat and/or prevent a disease, such as a genetic and/or epigenetic disease, in a subject; to treat and/or prevent genetic infectious diseases in a subject, such as bacterial infections, viral infections, fungal infections, parasite infections, and combinations thereof; to modify the composition or profile of a microbiome in a subject, which can in turn modify the health status of the subject; to modify cells ex vivo, which can then be administered to the subject whereby the modified cells can treat or prevent a disease or symptom thereof; or to treat mitochondrial diseases, where the mitochondrial disease etiology involves a mutation in the mitochondrial DNA.

[2836] Also provided is a method of treating a subject, e.g., a subject in need thereof, comprising inducing gene editing by transforming the subject with the polynucleotide encoding one or more components of the composition, system, or complex or any of polynucleotides or vectors described herein of the Cas12a editing system, and administering them to the subject.

[2837] Also provided is a method of treating a subject, e.g., a subject in need thereof, comprising inducing transcriptional activation or repression of multiple target gene loci by transforming the subject with the polynucleotides or vectors described herein, wherein said polynucleotide or vector encodes or comprises one or more components of composition, system, complex or component of the Cas12a editing system, and comprising multiple Cas effectors.

[2838] Also provided is a method of treating a subject, e.g., a subject in need thereof, comprising inducing gene editing by transforming the subject with the Cas effector(s), and encoding and expressing in vivo the remaining portions of the composition, system, (e.g., RNA, guides), complex or component of the Cas12a editing system. A suitable repair template may also be provided by the Cas12a editing system as described herein elsewhere.

[2839] Also provided is a method of treating a subject, e.g., a subject in need thereof, comprising inducing transcriptional activation or repression by transforming the subject with the systems or compositions herein.

[2840] Also provided is a method of inducing one or more polynucleotide modifications in a eukaryotic or prokaryotic cell or component thereof (e.g. a mitochondria) of a subject, infectious organism, and/or organism of the microbiome of the subject. The modification can include the introduction, deletion, or substitution of one or more nucleotides at a target sequence of a polynucleotide of one or more cell(s). The modification can occur in vitro, ex vivo, in situ, or in vivo.

[2841] In some embodiments, the method of treating or inhibiting a condition or a disease caused by one or more mutations in a genomic locus in a eukaryotic organism or a non-human organism can include manipulation of a target sequence within a coding, non-coding or regulatory element of said genomic locus in a target sequence in a subject or a non-human subject in need thereof comprising modifying the subject or a non-human subject by manipulation of the target sequence and wherein the condition or disease is susceptible to treatment or inhibition by manipulation of the target sequence including providing treatment comprising delivering a composition comprising the particle delivery system or the delivery system or the virus particle of any one of the above embodiment or the cell of any one of the above embodiment.

[2842] Also provided herein is the use of any of the above delivery systems, e.g., LNP delivery system in ex vivo or in vivo gene or genome editing; or for use in in vitro, ex vivo or in vivo gene editing.

[2843] Also provided herein are particle delivery systems, non-viral delivery systems, and/or the virus particle of any one of the above embodiments or the cell of any one of the above embodiments used in the manufacture of a medicament for in vitro, ex vivo or in vivo gene or genome editing or for use in in vitro, ex vivo or in vivo gene therapy or for use in a method of modifying an organism or a non-human organism by manipulation of a target sequence in a genomic locus associated with a disease or in a method of treating or inhibiting a condition or disease caused by one or more mutations in a genomic locus in a eukaryotic organism or a non-human organism.

[2844] In some embodiments, target polynucleotide modification using the subject Cas12a editing system and the associated compositions, vectors, systems and methods comprise addition, deletion, or substitution of 1 nucleotide to about 10,000 nucleotides at each target sequence of said polynucleotide of said cell(s). The modification can include the addition, deletion, or substitution of at least 1, 5, 10, 11, 12, 13, 14, 15, 16, 17, 18, 19, 20, 21, 22, 23, 24, 25, 26, 27, 28, 29, 30, 35, 40, 45, 50, 75, 100, 200, 250, 300, 500, 1000, 1500, 2000, 2500, 3000, 3500, 4000, 5000, 6000, 7000, 8000, 9000, or more nucleotides at each target sequence.

[2845] In some embodiments, formation of system or complex results in cleavage, nicking, and/or another modification of one or both strands in or near (e.g. within 1, 2, 3, 4, 5, 6, 7, 8, 9, 10, 20, 50, or more base pairs from) the target sequence.

[2846] In some embodiments, a method of modifying a target polynucleotide in a cell to treat or prevent a disease can include allowing a composition, system, or component of the subject Cas12a editing system to bind to the target polynucleotide, e.g., to effect cleavage, nicking, or other modification as the composition, system, is capable of said target polynucleotide, thereby modifying the target polynucleotide, wherein the composition, system, or component thereof, complex with a guide sequence, and hybridize said guide sequence to a target sequence within the target polynucleotide, wherein said guide sequence is optionally linked to a tracr mate sequence, which in turn can hybridize to a tracr sequence. In some embodiments, modification can include cleaving or nicking one or two strands at the location of the target sequence by one or more components of the composition, system, or component thereof.

[2847] In some embodiments, the Cas12a editing system and the associated compositions, systems, vectors, uses, and methods of use, can be used to treat diseases of the circulatory system. In some embodiments, the treatment can be carried out by using an AAV or a lentiviral vector to deliver the Cas12a editing system, composition, system, and/or vector described herein to modify hematopoietic stem cells (HSCs) or iPSCs in vivo or ex vivo. In some embodiments, the treatment can be carried out by correcting HSCs or iPSCs as to the disease using a composition, system, herein or a component thereof, wherein the composition, system, optionally includes a suitable HDR repair template (e.g., a template in the msDNA of the Cas12a editing system).

[2848] In some embodiments, the treatment or prevention for treating a circulatory system or blood disease can include modifying a human cord blood cell. In some embodiments, the treatment or prevention for treating a circulatory system or blood disease can include modifying a granulocyte colony-stimulating factor-mobilized peripheral blood cell (mPB) with any modification described herein. In some embodiments, the human cord blood cell or mPB can be CD34⁺. In some embodiments, the cord blood cells or mPB cells modified are autologous. In some embodiments, the cord blood cells or mPB cells are allogenic. In addition to the modification of the disease genes, allogenic cells can be further modified using the composition, system, described herein to reduce the immunogenicity of the cells when delivered to the recipient. The modified cord blood cells or mPB cells can be optionally expanded in vitro. The modified cord blood cell(s) or mPB cells can be derived to a subject in need thereof using any suitable delivery technique.

[2849] The composition and system may be engineered to target genetic locus or loci in HSCs. In some embodiments, the components of the systems can be codon-optimized for a eukaryotic cell and especially a mammalian cell, e.g., a human cell, for instance, HSC, or iPSC and sgRNA targeting a locus or loci in HSC, such as circulatory disease, can be prepared. These may be delivered via particles, such as the lipid nanoparticle delivery system described herein. The particles may be formed by the components of the systems herein being admixed.

[2850] In some embodiments, after ex vivo modification the HSCs or iPCS can be expanded prior to administration to the subject. Expansion of HSCs can be via any suitable method such as that described by, Lee, “Improved ex vivo expansion of adult hematopoietic stem cells by overcoming CUL4-mediated degradation of HOXB4.” Blood. 2013 May 16; 121(20):4082-9. doi: 10.1182/blood-2012-09-455204. Epub 2013 Mar. 21.

[2851] In some embodiments, the HSCs or iPSCs modified are autologous. In some embodiments, the HSCs or iPSCs are allogenic. In addition to the modification of the disease genes, allogenic cells can be further modified using the composition, system, described herein to reduce the immunogenicity of the cells when delivered to the recipient.

[2852] In some embodiments, the Cas12a editing system and the associated compositions, systems, vectors, uses, and methods of use, can be used to treat neurological diseases. In some embodiments, the neurological diseases comprise diseases of the brain and CNS.

[2853] Delivery options for the diseases in the brain include encapsulation of the systems in the form of either DNA or RNA into liposomes and conjugating to molecular Trojan horses for trans-blood brain barrier (BBB) delivery. Molecular Trojan horses have been shown to be effective for delivery of B-gal expression vectors into the brain of non-human primates. The same approach can be used to delivery vectors or vector systems of the invention. In other embodiments, an artificial virus can be generated for CNS and/or brain delivery.

[2854] In some embodiments, the Cas12a editing system and the associated compositions, systems, vectors, uses, and methods of use, can be used to treat hearing diseases or hearing loss in one or both ears. Deafness is often caused by lost or damaged hair cells that cannot relay signals to auditory neurons. In some embodiments, the composition, system, or modified cells can be delivered to one or both ears for treating or preventing hearing disease or loss by any suitable method or technique known in the art, such as US20120328580 (e.g., auricular administration), by intratympanic injection (e.g., into the middle ear), and/or injections into the outer, middle, and/or inner ear; administration in situ, via a catheter or pump (U.S. 2006/0030837) and Jacobsen (U.S. Pat. No. 7,206,639). Also see US20120328580. Cells resulting from such methods can then be transplanted or implanted into a patient in need of such treatment.

[2855] In some embodiments, the Cas12a editing system and the associated compositions, systems, vectors, uses, and methods of use, can be used to treat diseases in non-dividing cells. Exemplary non-dividing cells include muscle cells or neurons. In such cells, homologous recombination (HR) is generally suppressed in the G1 cell-cycle phase, but can be turned back on using art-recognized methods, such as Orthwein et al. (Nature. 2015 Dec. 17; 528(7582): 422-426).

[2856] In some embodiments, the Cas12a editing system and the associated compositions, systems, vectors, uses, and methods of use, can be used to treat diseases of the eye.

[2857] In some embodiments, the Cas12a editing system and the associated compositions, systems, vectors, uses, and methods of use, can be used to treat muscle diseases and cardiovascular diseases.

[2858] In some embodiments, the Cas12a editing system and the associated compositions, systems, vectors, uses, and methods of use, can be used to treat diseases of the liver and kidney.

[2859] In some embodiments, the Cas12a editing system and the associated compositions, systems, vectors, uses, and methods of use, can be used to treat epithelial and lung diseases.

[2860] In some embodiments, the Cas12a editing system and the associated compositions, systems, vectors, uses, and methods of use, can be used to treat diseases of the skin.

[2861] In some embodiments, the Cas12a editing system and the associated compositions, systems, vectors, uses, and methods of use, can be used to treat cancer.

[2862] In some embodiments, the Cas12a editing system and the associated compositions, systems, vectors, uses, and methods of use, can be used in adoptive cell therapy.

[2863] In some embodiments, the Cas12a editing system and the associated compositions, systems, vectors, uses, and methods of use, can be used to treat infectious diseases.

[2864] In some embodiments, the Cas12a editing system and the associated compositions, systems, vectors, uses, and methods of use, can be used to treat mitochondrial diseases.

[2865] In some embodiments, the Cas12a editing system and the associated compositions, systems, vectors, uses, and methods of use, can be used to treat hemoglobinopathies. The hemoglobinopathies are a group of disorders passed down through families in which there is abnormal production or structure of the hemoglobin molecule. Sickle cell disease (SCD) is one such blood disorder caused by the abnormal hemoglobin that damages and deforms red blood cells. The abnormal red cells break down, causing anemia, and obstruct blood vessels, leading to recurrent episodes of severe pain and multi-organ ischemic damage. SCD affects millions of people throughout the world and is particularly common among people whose ancestors come from sub-Saharan Africa, regions in the Western Hemisphere (South America, the Caribbean, and Central America); Saudi Arabia; India; and Mediterranean countries such as Turkey, Greece and Italy. There is no widely available cure for SCD although some children have been successfully treated with blood stem cell, or bone marrow, transplants. However, hematopoietic stem cell transplant is not widely done for SCD, because of the difficulty in finding a matched donor. Therefore, the number of people with SCD who get transplants is low. In addition, there are several complications associated with the procedure, including death in about 5 percent of people. In SCD, clinical severity varies, ranging from mild and sometimes asymptomatic states to severe symptoms requiring hospitalization. Symptomatic treatments exist, and newborn screening (NBS) for SCD can reduce the burden of the disease on affected newborns and children.

[2866] Thalassemia is another type of blood disorder that is caused by a defect in the gene that helps control the production of the globin chains that make up the hemoglobin molecule. There are two main types of thalassemia: (a) Alpha thalassemia occurs when a gene or genes related to the alpha globin protein are missing or changed (mutated). Alpha thalassemias occur most often in persons from Southeast Asia, the Middle East, China and in those of African descent. (b) Beta thalassemia occurs when a beta globin gene is changed (mutated) so as to affect production of the beta globin protein. Beta thalassemias occur most often in persons of Mediterranean origin. To a lesser extent, Chinese, other Asians and African Americans can be affected.

[2867] The Cas12a editing system may be used to target a correction in the defective gene that causes the hemoglobinopathy.

[2868] All publications, published patent documents, and patent applications cited herein are hereby incorporated by reference to the same extent as though each individual publication, published patent document, or patent application was specifically and individually indicated as being incorporated by reference.

### K. Sequences

[2869] In various embodiments, the (Cas Type V) polypeptide is a polypeptide selected from any one of Tables S1A-S15A, or a polypeptide having at least 70%, 75%, 80%, 85%, 90%, 95%, 99%, or 100% sequence identity with a polypeptide from any one of Tables S1A-S15A. In various other embodiments, the (Cas Type V) polypeptide is encoded by a polynucleotide sequence selected from any one of Tables S1B-S15B, or a polynucleotide having at least 70%, 75%, 80%, 85%, 90%, 95%, 99%, or 100% sequence identity with a polynucleotide of any one of Tables S1B-S15B. In various other embodiments, the Cas12a (Cas Type V) guide RNA is selected from any Cas12a (Cas Type V) guide sequence disclosed in the following tables, including Table S15C, or a nucleic acid molecule having at least 70%, 75%, 80%, 85%, 90%, 95%, 99%, or 100% sequence identity with a Cas12a (Cas Type V) guide sequence of any of the following relevant tables, including Table S15C.

### Group 1 Sequences (SEQ ID Nos: 1-19)

TABLE S1A
Enzyme Sequences Group 1

| SEQ ID | |
|---|---|
| NO | Sequence |
| 1 | MEELMTNFSDFTGLFSLSKTLRFELKPVGKTKETFKQWLENMNSTNEEGNLLAKD |
| | KKIKDAYLALKPVMNSLHEQFIEMSLLSGKAKEIDFSKYYEAYKEKNVSSKLEEEL |
| | RAKIGETYEIAGNYFYKEISNVLGKEIKPKKDKPYECLTDAKMLKYLSAKVQELAE |
| | QNGVDEQTLKGHLEQFKGFWGYLDGYNQNRENYYEYEKEASTAVATRIVHENLP |
| | TFCSNVLRFENRKDEYLGIYQYLKDKNRETKIKNSKGEEVDAKAISESVFQIKHFNE |
| | CLTQPQIEEYNRIIGNYNLLINLYNQARREEAGFKKIDEFETLYKQIGCGKKKSMFET |
| | LQNDSDVKDLLQNAKNAGDVMFKNTLPAFIRFLKECDNWDGIYMSSAAVNKISNQ |
| | YFANWHSIKDKLKDAKANACITYDKNREEQIKLRDAVELSGLFAVLDTEHSEHFFK |
| | DSLFKDNETNEYRGILDKDLPPSKNLINLLCFDIERNIKAFLQESDRIAALEKYKDENI |
| | QAGEEDQTIKKIKEWFDAATDAMRIVRYFAVRKSKMKGNLPNVTMEQALSNLLYN |
| | DDVQWFKWYDLVRNYFTKKPQDDAKENKLKLNFGKGTLLNGFVDSHSDSDNGTQ |
| | YGGYIFRKKHEKCNEYEYFLGVSKNAQLFRCHLKNEVPSNDKSAFERLEYYQMKS |
| | TTPYPNDYGNKKEEIIDVVRKLAEDNEELVEWIDKKNEDKKLTPTELFKRLENTND |
| | PILKNKELLNKVDETISIIKSNLKNFTRINAINDLQNDDQNHGGIDGFKKLVDELKKI |
| | TAATKLFDFFPVSSSEFNAHNGEDLFLFKISNKDLSYCETFAEGKRKEKTNQKENLH |
| | TLIFRALMREDLFGDIVDIGKGEVFLREKVREYDYDDSVRKYGHHYNDLKDRFTYP |
| | IISNKRFSEDKILLHLSVILNYKSDNKKNVGVEINDALQQSDNLQFIGIDRGEKHLVY |
| | SCTIDKNAKIIKCNHHDNINGTDYVKKLEDVADERIIAKKNWQAQNKIKDLKTGYIS |
| | HVVHRLVEETIKDGEKIAPHAYIVLEDLNTEMKRGRQKIEKQIYQNLETALAKKLN |
| | FVVDKDAKEGELGSVSKALQLTPPISNYQDIEGKKQFGVMLYTRANYTSVTDPATG |
| | WRKTIYIKNGKEEDIMNQIFKEFSDFGFDGKDYYFEYTEANAGHTWRLYSGKDGKP |
| | LPRFQNKKQIQQDKNIWVPEQINVVKILDEIFADFDKAKSFKTQIEEGIELKKAGGRT |
| | ETAWQSLRYALELIQQIRNSGEKDSKDDNFLYSPVRNENGEHFDTRHPEKNGDLSKI |
| | VDADANGAYNIARKGLIMDAHIKHWIESGRPKTKKDGKEKSDLDLFISDKEWDLW |
| | LLDREQWKKDLPAFASLSAKDDADKSKAGRGRKKQ |
| 2 | MEQFTNLFQLSKTLKFELKPIGKTEETFKQWLEEIQKSELDVYNDSNLFLKDKKIKD |
| | AYLAIKPIMDKLHEQFIEESLTSDLAKNIDFSEYYEAFRNKTVKDEMETKLRKVFAE |
| | TYQYAGKLFIDMISKAQKNGKEIKTKKEKPYECLTDSKILNFLSANVKELAKLTDA |
| | NEQELTNHIKQFRGFWGYLDGFNTNRENYYVTEKEQSTAVATRIVHENLPTFCSNA |
| | LRFEKRREEYLGIYQYLKDNNRETKIKNSQGEEIEAESIDVSYFEIEHFNECLAQSQID |
| | EYNRVISHYNLLINLYNQARREESQFKKIDEFEILYKQIGCGKKQSMFEILQSDNDVR |
| | NLLQKVRRAGDIMFKKGHSEGEIDNVYDFIQFLKECDNWEGIYMSNAAINKISNLY |
| | FANWHSIKDKLKESKANACITYDKKREEPIKLRDAVELSGLFEVLDQEQPEHILKES |
| | LFKDEATNEYRGVLKKELSPSKNIIMLLCYDIERNTKAFLDSSDSIVAIEKFKDKKQF |
| | VGEEDQTIKQVKDWLDAATDAMRIVRYFAVRKSKMKGNLPNVTMEQALSNLLHN |
| | EDAQWFKWYDLIRNYLTKKPQDDAKENKLKLNFGTSSLLGGWSDGQEKTKAATL |
| | LRNNNALYLCILKTKNVFDTSKDNNPIYNVSQSNASRLILRNLKFQTLAGKGFLGEY |
| | GISYGEMGKNDSTKAISCLQKIIKTRYVDKYPLLEKFVTNTYTDKREFDAEILETLKE |
| | CYVCEFKPIDWTFVIEKQNAGELFLFKISSKDYLPNAKGRKDLQTMYWEDVLSDGS |
| | KHQLCAGAEIFMREPVAKESPVMHRIGSKLVNRRDKDGNTIPEHIYREIYSYVNGK |
| | MSVVSAKAQKYIDDKRVIVKDVKHEIVKDKRFYGETKYMFHCPIKLYFEAKDPKY |
| | AFSEVNKTITDSLQQSPNLQFIGIDRGEKHLVYSCTVDTNCKIIRCNHHDFINGTDYV |
| | QKLDAVANDRIIAKKNWQAQSKIKDLKSGYISHVVHRLVDETIKDGNVIAPHAYIV |
| | LEDLNTEMKRGRQKIEKQVYQNLEVALAKKLNFVVDKNAKHGELGSVSMALQLT |
| | PPINNYQDIEGKKQFGVMLYTRANYTSVTDPATGWRKTIYIKNGKEEDIRKQILEAF |
| | RDFGFDGRDYYFEYTEANVGHTWRMYSGNNGKPLPRFRNRKQIFQDKNVWVSEQI |
| | NVVEILDRLFVKFDKKKSFKEQIEQGKELEKVEWRDESAWQSFRFALDLIQQIRNSG |
| | TEDNDDNFLYAPVRNDHGEHFDTRNHKNNGELSEIRDADANGAYNIARKGLIMDA |
| | HIKRWIEIGCPTVSEDKAPDLDLFISDLEWDLWLLDRERWEKELPIFASRSAKKKED |
| | KQQTRGKKQ |
| 3 | MKEFTNLYQLSKTLRFELKPIGKTAKTFQRWLEEMNKAELVGDNDGNLFLKDKKI |
| | KNAYLAIKPIMDKLHEQLIEMALLSKEAKQIDFSEYFEAYKNKAVRVEMENGLRKA |
| | FAKPFQYAGLYFVEEISKSQKNGKEIKTKKDKQYECLTDAKMYNYLSAHVRDLAE |
| | QNGIDEQKLKKHIEQFKGFWGYLDGYNQNRENYYEVDKEASTAVATRIVHENLPT |
| | FCSNAMRFEKRKDEYLCIHRYLKDNSRETKIKNTKGEEIDVEAISDNIFQIKHFNECL |
| | AQSQIEEYNRIIGNYNMLINLYNQLRRGEKDFKKIDEFEKLKKQIGCGKKKSMFETL |
| | QGDSDVKKLLLKASEAGKQMFKDVADFSEIKTVPDFIEFLRECDNWDGIYMSKTAI |
| | DKISSLYFANWHSIKDKLKEAKADACITYEKKREEPIKLRDAVELSGLFAVLDSEQS |
| | EHFFKDSLFKDDDTNDYRGVLNKTLTPSKNLIQLLCFDIERNTNAFLSKSNNIVKLE |
| | KYKDENDQAGEEDQTIRKIKEWFDAATDAMRIVRYFSVRKSKMKGNIPNATIEQAL |
| | SNLLYNDDAQWFKWYDLIRNYLTKKPQDDAKENKLKLNFGTSSLLGGWSDGQEK |
| | TKVATLLKYHDEIYLCVLKTKNIFDTSKDNNPIYDITESEASRLLLRNLKFQTLAGK |
| | GFLGEYEISYGDMGKENPTKAIKCLQKIIKERYVNKYPLLEKFARNTYTDKAQFDA |
| | EITETLKECYVCQFVPIDWNVVTEKQDNEELFLFKILCKDYRPKSVGKKDLQTMYW |
| | EDVLSDGSKHQLCAGAEIFMREPVAKESPIIHRIGSKFVNKRDKDGDTIPEQIYREIY |
| | SYANGKKKTISAESRKYIDEQKVIIKDVKHKIIKDNRFYGETKYMFHCPIKLQFEAK |
| | DPKYAYSEVNTTVSNALQQSDNLQFIGIDRGEKHLVYSCIVDKDCKILKCGHHDVI |
| | NGTDYVQKLEAVADERIVAKKNWQQQNKIRDLKNGYISHVVHRLVEETIKDNGKI |
| | APHAYIVLEDLNTEMKRGRQKIEKQVYQNLETALAKKLNFVVDKDTKKGEIGSVS |
| | KALQLTPPINNYQDIEGKKQFGVMLYTRANYTSVTDPATGWRKTIYIKNGKEDDIK |
| | NQILDKFSDFGFDGDYYFEYTEANVGHTWRLYSGKNGKALPRFQNKKQALQDKN |
| | VWVPEKINVVDILNKLFAKFDKKKSFKSQIEAGVELQKDEERNETAWQSLRFALDL |
| | IQQIRNSGEKNSGDDNFLYSPVRNDKDEHFDTRNYKNNGELSEIRDADANGAYNIA |
| | RKGLIMDTHIKHWINNGRPKTKIDGSEVSDLDLFISDREWDLWLLDREQWMKELPT |
| | FASKIAKYDSDAPQTAKRRKKR |

TABLE S1B
Human Codon Optimized Nucleotide Sequences Group 1

| SEQ | | |
|---|---|---|
| ID | Corresponding | |
| NO | AA | Sequence |
| 4 | 1 | ATGGAGGAACTCATGACGAATTTTTCTGATTTCACAGGCCTCTTTTCTCTGT |
| | | CTAAGACCCTGAGATTCGAATTAAAGCCAGTCGGGAAAACTAAGGAGACT |
| | | TTTAAGCAGTGGTTGGAGAACATGAACTCTACAAACGAGGAGGGCAACCT |
| | | GCTGGCCAAAGACAAGAAAATTAAGGATGCGTACCTGGCCCTGAAACCAG |
| | | TTATGAATAGCTTGCACGAACAGTTTATTGAGATGAGTCTACTGTCCGGCA |
| | | AGGCAAAGGAGATTGACTTCAGTAAATACTACGAGGCCTACAAGGAGAAA |
| | | AATGTGAGCAGCAAACTCGAAGAAGAGTTGCGTGCCAAAATTGGAGAAAC |
| | | ATACGAAATCGCAGGGAACTACTTCTACAAAGAGATCTCCAATGTTCTTGG |
| | | CAAGGAAATCAAACCTAAGAAAGACAAGCCCTATGAGTGCCTCACTGATG |
| | | CTAAAATGCTGAAATATTTGTCAGCGAAGGTGCAAGAATTAGCAGAGCAG |
| | | AACGGTGTGGACGAACAAACACTTAAGGGACATCTGGAGCAATTTAAGGG |
| | | GTTTTGGGGGTACCTGGACGGGTACAACCAGAATAGAGAAAACTACTACG |
| | | AGTACGAGAAAGAGGCTTCCACTGCAGTGGCCACCCGAATCGTGCATGAA |
| | | AATCTGCCCACATTTTGTAGTAACGTTCTGCGCTTCGAAAACCGAAAAGAC |
| | | GAGTATCTAGGCATATATCAGTACTTGAAGGACAAGAATCGGGAAACCAA |
| | | GATTAAAAACTCAAAGGGGGAAGAAGTTGACGCTAAGGCAATATCGGAGT |
| | | CAGTCTTTCAGATTAAGCACTTCAACGAATGTTTAACCCAACCCCAAATCG |
| | | AAGAGTATAACAGAATCATCGGCAACTACAATCTCCTGATCAACCTGTATA |
| | | ACCAGGCCCGTAGGGAAGAGGCCGGTTTCAAGAAAATCGACGAGTTCGAG |
| | | ACATTGTATAAACAGATCGGCTGTGGCAAAAAAAAATCAATGTTCGAGAC |
| | | ACTTCAGAACGACAGTGACGTGAAAGACTTGCTGCAGAATGCCAAGAATG |
| | | CTGGTGACGTTATGTTTAAAAATACACTTCCGGCCTTCATCAGATTCTTGAA |
| | | GGAGTGTGATAATTGGGATGGCATATACATGAGCTCCGCCGCCGTGAATAA |
| | | GATCAGCAACCAGTATTTTGCAAACTGGCACAGTATCAAGGATAAGTTGAA |
| | | GGATGCTAAAGCCAATGCCTGTATCACCTACGATAAAAACAGGGAAGAAC |
| | | AAATCAAACTGCGGGATGCTGTAGAGCTATCTGGGCTGTTCGCTGTGTTGG |
| | | ACACCGAACACTCCGAACACTTCTTTAAGGACTCACTGTTCAAAGACAATG |
| | | AGACGAACGAGTATAGGGGCATTCTCGACAAAGACTTGCCACCTAGCAAA |
| | | AATCTGATCAACCTTCTATGCTTCGATATTGAGAGGAATATAAAAGCCTTC |
| | | CTCCAGGAATCAGATCGGATCGCTGCTTTGGAGAAGTACAAAGACGAGAA |
| | | TATCCAGGCTGGAGAGGAGGATCAGACCATCAAAAAAATCAAGGAATGGT |
| | | TCGATGCAGCGACAGACGCCATGAGGATTGTACGCTATTTTGCCGTCCGGA |
| | | AATCAAAAATGAAGGGTAACCTGCCAAATGTGACCATGGAGCAGGCTCTG |
| | | AGCAACTTACTGTACAACGATGATGTGCAGTGGTTCAAGTGGTACGACTTG |
| | | GTCAGGAATTATTTTACAAAGAAGCCTCAGGACGATGCCAAAGAGAATAA |
| | | GCTTAAACTCAATTTTGGCAAGGGTACCCTATTAAATGGCTTCGTGGATTC |
| | | CCATAGCGATAGTGATAATGGAACTCAGTACGGGGGTTACATATTCCGTAA |
| | | AAAACACGAGAAATGCAACGAATACGAATATTTCTTAGGGGTATCCAAGA |
| | | ACGCGCAACTCTTCAGATGCCATCTGAAGAACGAGGTCCCTAGCAATGACA |
| | | AATCAGCCTTCGAGCGCCTTGAATACTATCAGATGAAATCCACTACACCCT |
| | | ATCCAAATGATTACGGGAATAAAAAGGAAGAGATCATTGACGTGGTTAGA |
| | | AAACTGGCCGAGGATAATGAGGAACTGGTGGAATGGATCGACAAAAAGAA |
| | | TGAGGACAAAAAGCTTACTCCCACTGAGCTCTTCAAGCGGCTTGAGAACAC |
| | | CAACGACCCAATTCTGAAGAATAAGGAACTGCTCAACAAGGTGGACGAAA |
| | | CCATATCCATCATCAAGTCTAATCTCAAGAATTTTACCCGGATCAACGCTA |
| | | TTAACGATTTACAGAATGACGACCAGAATCACGGTGGTATTGATGGTTTTA |
| | | AAAAGCTCGTCGACGAACTAAAGAAGATTACTGCAGCCACCAAGCTTTTCG |
| | | ATTTTTTCCCTGTGTCGTCTAGTGAATTTAATGCGCACAATGGGGAAGACCT |
| | | GTTTCTCTTCAAGATTTCAAACAAGGATCTCAGCTACTGTGAAACATTTGC |
| | | GGAGGGCAAGCGCAAAGAAAAAACCAATCAAAAGGAGAACCTCCATACC |
| | | CTGATCTTCAGAGCGCTGATGAGAGAGGACCTGTTTGGAGATATTGTCGAC |
| | | ATCGGAAAGGGCGAGGTTTTTCTCCGAGAGAAGGTGCGGGAGTACGACTA |
| | | TGACGATAGCGTGCGCAAATATGGGCATCATTACAACGACCTGAAGGATA |
| | | GGTTTACATACCCCATTATTTCAAACAAACGATTCTCTGAGGATAAGATTC |
| | | TCCTACACCTGTCTGTCATTTTGAACTACAAGTCCGATAACAAGAAAAACG |
| | | TGGGGGTCGAAATAAACGACGCCCTGCAGCAATCCGACAATTTGCAATTCA |
| | | TTGGAATTGACCGCGGGGAGAAGCACCTGGTTTATAGCTGCACCATCGATA |
| | | AGAATGCCAAAATCATAAAGTGCAACCATCACGATAACATCAACGGAACA |
| | | GACTATGTCAAGAAACTGGAGGACGTGGCTGACGAACGAATTATTGCCAA |
| | | AAAGAATTGGCAAGCTCAAAACAAGATTAAGGACCTGAAGACCGGATACA |
| | | TTAGCCACGTAGTACATCGCCTGGTGGAAGAGACGATCAAAGATGGAGAA |
| | | AAAATAGCTCCTCACGCATATATAGTGCTTGAGGATCTCAACACAGAGATG |
| | | AAAAGGGGCCGGCAGAAGATCGAGAAACAGATTTACCAAAATCTGGAAAC |
| | | TGCTCTTGCAAAAAAGCTCAATTTCGTAGTTGATAAGGATGCCAAGGAAGG |
| | | CGAGCTCGGCAGCGTGTCCAAAGCCCTTCAGCTTACTCCCCCTATAAGCAA |
| | | TTATCAGGATATCGAGGGAAAGAAACAGTTCGGAGTGATGCTATATACCC |
| | | GGGCAAACTACACCTCGGTCACTGACCCGGCTACTGGCTGGAGGAAGACC |
| | | ATCTATATTAAGAATGGCAAAGAGGAGGACATCATGAACCAGATCTTCAA |
| | | AGAGTTTTCCGATTTTGGCTTTGACGGAAAGGATTACTATTTTGAGTATACG |
| | | GAAGCAAACGCCGGTCACACGTGGAGACTTTACAGCGGCAAGGACGGCAA |
| | | GCCCTTACCCCGCTTTCAGAACAAGAAGCAGATACAGCAGGACAAGAACA |
| | | TTTGGGTCCCGGAACAGATCAATGTTGTGAAGATTCTCGACGAGATATTCG |
| | | CCGACTTCGATAAGGCTAAGTCGTTCAAAACCCAGATCGAAGAGGGGATT |
| | | GAACTGAAGAAGGCAGGAGGGAGAACTGAAACGGCTTGGCAGTCCCTGCG |
| | | ATATGCGCTGGAGCTGATACAGCAGATCCGCAATTCTGGAGAAAAAGACA |
| | | GTAAGGATGATAACTTTCTCTATTCACCAGTCCGTAATGAGAACGGTGAAC |
| | | ACTTTGACACAAGACATCCAGAGAAGAACGGGGATCTCTCTAAAATTGTG |
| | | GATGCAGATGCCAATGGGGCCTATAACATCGCACGCAAGGGACTGATTAT |
| | | GGACGCTCATATCAAACACTGGATCGAATCTGGCAGGCCTAAGACTAAGA |
| | | AAGATGGAAAGGAGAAAAGTGATCTGGACTTGTTCATAAGCGACAAGGAG |
| | | TGGGACCTGTGGTTACTTGATCGGGAGCAGTGGAAGAAGGACCTGCCTGCC |
| | | TTTGCTTCCCTGTCTGCAAAAGACGATGCAGATAAAAGTAAAGCCGGCAGG |
| | | GGACGGAAAAAGCAATGA |

TABLE S1C
Direct Repeat Group 1

| SEQ ID | | SEQ ID | |
|---|---|---|---|
| NO | Direct Repeat (Variant #1) | NO | Direct Repeat (Variant #2) |
| 7 | CTGCTAAACCGCTAAAATTTCTAC | 8 | GGCTGCTAAACCGCTAAAATTTC |
| | TATTGTAGAT | | TACTATTGTAGAT |
| 9 | ATCTACGATAGTAGAAATTATAA | 10 | ATCTACGATAGTAGAAATTATA |
| | TGGCTTTATAGCC | | A |
| 11 | GTCTATAGGACTCAAATAATTTCT | 12 | GTCTATAGGACTCAAATAATTTC |
| | ACTATTGTAGAT | | TACTATTGTAGAT |

TABLE S1D
crRNA Sequences Group 1

| SEQ | | | |
|---|---|---|---|
| ID | | | |
| NO | Sequence | FIG | Name |
| 13 | GGCUGCUAAACCGCUAAAAUUU | FIG. | MGYG000290766_ |
| | CUACUAUUGUAGAU | 1A | _951__gen |
| 14 | GGCUAUAAAGCCAUUAUAAUUU | FIG. | CADAJV010000039.1_ |
| | CUACUAUCGUAGAU | 1B | 18 |
| 15 | GUCUAUAGGACUCAAAUAAUUU | FIG. | MGYG000293160_ |
| | CUACUAUUGUAGAU | 1C | _375__gen |

TABLE S1E
Consensus Sequence Group 1

| SEQ | |
|---|---|
| ID | |
| NO | Consensus Sequence (of SEQ ID Nos: 1-3) |
| 16 | MEELMTNMXXFTNLFQLSKTLRFELKPIGKTXETFKQWLEEMN |
| | KXELXXXNDGNLFLKDKKIKDAYLAIKPIMDKLHEQFIEMSLL |
| | SXXAKXIDFSEYYEAYKNKXVXXEMEXXLRKXFAETYQYAGXY |
| | FXXEISKXQKNGKEIKTKKDKPYECLTDAKMLNYLSAXVXELA |
| | EQNGXDEQXLKXHIEQFKGFWGYLDGYNQNRENYYEXEKEAST |
| | AVATRIVHENLPTFCSNALRFEKRKDEYLGIYQYLKDNNRETK |
| | IKNSKGEEIDAEAISXSXFQIKHFNECLAQSQIEEYNRIIGNY |
| | NLLINLYNQARREEXXFKKIDEFEXLYKQIGCGKKKSMFETLQ |
| | XDSDVKXLLQKAXXAGDXMFKXXXXXXEIXTVPDFIXFLKECD |
| | NWDGIYMSXAAINKISNLYFANWHSIKDKLKEAKANACITYDK |
| | KREEPIKLRDAVELSGLFAVLDXEQSEHFFKDSLFKDXXTNEY |
| | RGVLXKXLXPSKNLIXLLCFDIERNTKAFLXXSDXIVALEKYK |
| | DENXQAGEEDQTIKKIKEWFDAATDAMRIVRYFAVRKSKMKGN |
| | LPNVTMEQALSNLLYNDDAQWFKWYDLIRNYLTKKPQDDAKEN |
| | KLKLNFGTSSLLGGWSDGQEKTKXATZZZZZLLRZZZZZZNXX |
| | EXYLCVLKTKNXFDTSKDNNPIYXXXXSNASRLXLRNLKFQTL |
| | AGKGFLGEYGISYGEMGKZZZZZZEDXTKAIXCLQKIIKXRYV |
| | XKYPLLEKFZZXXNTYTDKXEFDAEIXETLKZZECYVCXFXPI |
| | DWZZXXVXEKQNXGELFLFKILXKDYXPXXXGXKDLQTMYWED |
| | VLSDGSKHQLCAGAEIFMREPVAKESPXXHRIGSKXVNXRDKD |
| | GXTIPEXIYRZZZZZZZZZZZZZZZZZEIYSYXNGKXXXXSAX |
| | XRKYIDXXXVIXKDVKHXIIKDKRFYGETKYMFHCPIKLXFEA |
| | KDPKYAXSEVNXTIXDALQQSDNLQFIGIDRGEKHLVYSCTVD |
| | KNCKIIKCNHHDXINGTDYVQKLEAVADERIIAKKNWQAQNKI |
| | KDLKXGYISHVVHRLVEETIKDGXKIAPHAYIVLEDLNTEMKR |
| | GRQKIEKQVYQNLETALAKKLNFVVDKDAKXGELGSVSKALQL |
| | TPPINNYQDIEGKKQFGVMLYTRANYTSVTDPATGWRKTIYIK |
| | NGKEEDIXNQILXXFSDFGFDGXDYYFEYTEANVGHTWRLYSG |
| | KNGKPLPRFQNKKQIXQDKNVWVPEQINVVXILDXLFAKFDKK |
| | KSFKXQIEXGXELXKXEXRXETAWQSLRFALDLIQQIRNSGEK |
| | DSXDDNFLYSPVRNDXGEHFDTRNXKNNGELSEIRDADANGAY |
| | NIARKGLIMDAHIKHWIEXGRPKTKXDGXEXSDLDLFISDXEW |
| | DLWLLDREQWXKELPXFASXSAKXDXDKXQTXXRRKKQ |

Wherein: each X is independently selected from any naturally occurring amino acid; and each Z is independently selected from absent and any naturally occurring amino acid.

TABLE S1F
Native Nucleotide sequences Group 1

| SEQ | | |
|---|---|---|
| ID | Corresponding | |
| NO | AA | Sequence |
| 17 | 1 | ATGGAGGAGTTGATGACAAATTTTTCTGATTTCACGGGGCTTTTTTCGCTTAGC |
| | | AAGACTCTCAGGTTTGAACTTAAACCTGTTGGGAAAACTAAAGAAACCTTTAA |
| | | GCAATGGCTTGAAAATATGAATAGCACCAATGAGGAAGGCAACTTGTTGGCAA |
| | | AGGATAAGAAAATCAAAGATGCCTATTTAGCATTAAAGCCAGTAATGAATAGT |
| | | CTGCATGAGCAGTTTATTGAAATGTCTTTGCTCTCTGGTAAAGCGAAGGAAATC |
| | | GATTTCTCGAAATACTATGAAGCATACAAAGAAAAAAACGTTTCAAGCAAGCT |
| | | TGAGGAAGAATTACGCGCAAAAATTGGTGAAACCTATGAGATTGCTGGGAATT |
| | | ATTTTTATAAAGAAATAAGCAATGTTCTTGGCAAAGAAATCAAACCAAAGAAA |
| | | GATAAGCCATACGAATGCCTTACTGATGCTAAAATGCTCAAGTACTTATCAGCC |
| | | AAAGTACAGGAATTGGCTGAACAAAACGGCGTAGACGAACAAACCCTTAAAG |
| | | GTCATCTTGAACAATTCAAAGGATTTTGGGGATATTTGGACGGATATAACCAGA |
| | | ATCGTGAGAATTATTATGAATATGAGAAAGAGGCTTCAACCGCTGTTGCTACAC |
| | | GTATTGTCCACGAAAATCTACCCACATTTTGCAGCAATGTTTTGCGTTTTGAGA |
| | | ATCGCAAGGACGAGTATCTCGGCATTTACCAGTATTTGAAAGATAAGAACCGC |
| | | GAAACAAAGATTAAAAATTCAAAAGGCGAAGAAGTTGACGCAAAAGCAATTT |
| | | CTGAAAGTGTTTTTCAAATCAAGCATTTTAACGAATGCCTTACGCAGCCGCAAA |
| | | TTGAAGAGTACAACCGAATTATTGGCAATTACAATTTGCTAATCAACCTATACA |
| | | ATCAGGCACGACGAGAGGAAGCAGGTTTCAAGAAGATAGACGAGTTTGAAAC |
| | | CTTATACAAACAAATTGGTTGCGGTAAAAAGAAATCGATGTTTGAAACGTTGC |
| | | AAAACGACAGTGATGTAAAAGATCTTCTGCAAAATGCTAAAAATGCAGGCGAT |
| | | GTAATGTTTAAAAATACCCTGCCGGCATTTATCCGGTTTTTGAAAGAGTGCGAT |
| | | AACTGGGACGGCATTTATATGTCAAGTGCCGCCGTCAATAAAATATCAAACCA |
| | | GTACTTTGCTAATTGGCACAGTATCAAGGATAAATTAAAAGACGCAAAAGCAA |
| | | ACGCATGCATCACATACGATAAAAACAGGGAAGAGCAAATAAAACTGCGTGAT |
| | | GCTGTGGAATTGTCGGGATTGTTCGCTGTGTTGGATACAGAACATTCGGAACAC |
| | | TTTTTCAAAGACTCGCTTTTCAAGGATAACGAAACCAACGAGTATCGTGGCATT |
| | | TTGGATAAAGATCTTCCGCCAAGCAAAAATCTCATCAATTTGTTGTGCTTTGAT |
| | | ATTGAGCGCAACATAAAGGCATTTCTGCAAGAATCTGATAGGATTGCCGCATT |
| | | GGAAAAATACAAAGACGAAAACATTCAGGCAGGTGAAGAAGACCAGACGATA |
| | | AAGAAAATAAAAGAGTGGTTTGATGCAGCAACCGATGCTATGCGTATTGTGCG |
| | | CTATTTTGCTGTGCGTAAAAGCAAGATGAAAGGCAACTTGCCAAATGTGACGA |
| | | TGGAACAGGCATTGAGCAACTTGCTATACAACGATGATGTCCAGTGGTTCAAG |
| | | TGGTATGACCTTGTTCGCAACTATTTTACCAAGAAACCTCAAGACGATGCAAAA |
| | | GAAAATAAATTGAAGTTGAATTTTGGAAAAGGAACATTGTTAAATGGATTTGTT |
| | | GATTCTCATAGTGATTCGGATAATGGTACGCAATATGGTGGCTATATTTTTAGA |
| | | AAGAAACATGAAAAGTGCAATGAATATGAATATTTCTTGGGTGTCAGTAAAAA |
| | | TGCGCAACTGTTTAGATGTCATTTGAAAAATGAAGTTCCTTCCAATGATAAAAG |
| | | TGCTTTTGAGCGTTTGGAGTATTACCAAATGAAATCAACGACACCGTATCCAAA |
| | | TGACTATGGTAACAAAAAAGAGGAAATTATAGATGTTGTGAGAAAATTAGCCG |
| | | AAGATAATGAAGAATTGGTAGAGTGGATTGATAAGAAAAATGAAGACAAGAA |
| | | ATTAACACCAACAGAGTTGTTTAAGAGATTGGAGAATACAAATGATCCTATATT |
| | | GAAAAATAAAGAACTATTAAACAAGGTAGATGAGACCATTTCTATAATCAAAT |
| | | CTAATCTCAAAAACTTTACACGTATTAATGCGATTAATGACCTTCAAAACGATG |
| | | ACCAGAACCATGGTGGCATAGACGGTTTTAAGAAGCTGGTAGATGAATTAAAG |
| | | AAAATTACTGCAGCAACTAAACTGTTTGATTTCTTTCCTGTCAGCTCAAGTGAG |
| | | TTTAATGCTCACAATGGAGAAGATTTGTTTTTGTTTAAAATATCAAACAAAGAT |
| | | TTGTCATACTGCGAAACATTTGCAGAAGGAAAAAGAAAAGAAAAAACAAATC |
| | | AAAAAGAAAATCTACATACATTAATTTTTAGAGCTTTGATGCGTGAAGATTTAT |
| | | TTGGTGATATTGTCGATATTGGGAAAGGAGAAGTCTTTTTACGTGAAAAGGTCA |
| | | GAGAATATGATTACGATGATAGTGTACGAAAGTATGGACATCACTACAATGAT |
| | | TTAAAGGACAGATTTACTTATCCCATTATTTCAAACAAGCGTTTTTCAGAAGAT |
| | | AAAATTCTTTTACATTTGTCAGTAATATTGAATTATAAGTCTGATAATAAGAAA |
| | | AACGTAGGAGTAGAAATTAACGACGCTCTCCAACAATCCGACAACCTACAATT |
| | | TATCGGCATTGATCGTGGCGAAAAGCACCTTGTGTATAGCTGCACGATAGATA |
| | | AGAATGCTAAGATCATAAAATGCAACCACCACGATAATATCAATGGAACTGAC |
| | | TATGTGAAAAAGTTAGAGGATGTTGCCGACGAGCGTATTATTGCCAAAAAGAA |
| | | TTGGCAGGCACAGAACAAAATCAAGGATTTGAAGACCGGCTATATATCACATG |
| | | TTGTGCATCGTTTGGTGGAAGAAACCATCAAAGACGGCGAGAAAATTGCCCCG |
| | | CACGCTTACATCGTTTTGGAAGATTTAAACACCGAGATGAAGCGCGGTCGCCA |
| | | AAAGATTGAAAAGCAGATTTATCAAAACCTGGAAACAGCGCTCGCAAAGAAAC |
| | | TCAATTTTGTTGTGGATAAAGACGCTAAGGAGGGCGAACTTGGCTCTGTGAGCA |
| | | AGGCTTTGCAACTTACGCCGCCAATCAGCAACTATCAAGATATTGAGGGCAAG |
| | | AAACAATTCGGTGTAATGCTTTATACGAGAGCAAATTATACTTCTGTTACTGAT |
| | | CCGGCAACAGGATGGCGCAAAACCATTTATATAAAAAATGGCAAGGAAGAAG |
| | | ACATTATGAACCAGATATTTAAGGAATTCAGTGATTTTGGTTTTGACGGAAAAG |
| | | ACTATTACTTTGAATACACCGAAGCCAATGCAGGGCACACTTGGCGTTTGTATT |
| | | CCGGCAAAGATGGCAAACCGCTACCTCGTTTCCAAAACAAGAAGCAAATACAG |
| | | CAGGACAAGAATATTTGGGTGCCTGAGCAAATAAATGTGGTAAAAATCCTTGA |
| | | TGAAATTTTTGCTGATTTTGATAAAGCGAAGTCGTTTAAAACACAGATTGAAGA |
| | | AGGTATTGAATTAAAAAAGGCTGGTGGACGAACCGAAACGGCTTGGCAATCGC |
| | | TTCGATATGCGCTTGAATTGATTCAGCAAATCCGCAATTCAGGTGAAAAGGATT |
| | | CCAAAGACGACAACTTCTTATATTCCCCCGTCCGCAACGAAAACGGTGAACAC |
| | | TTTGACACGCGCCATCCAGAAAAGAATGGCGACTTGTCCAAAATCGTAGATGC |
| | | CGATGCCAATGGCGCATACAACATCGCTCGCAAAGGCTTGATTATGGATGCGC |
| | | ACATCAAGCATTGGATTGAAAGCGGACGGCCAAAAACGAAAAAAGACGGAAA |
| | | AGAAAAATCTGATTTAGATTTGTTTATTTCTGATAAAGAGTGGGATTTGTGGCT |
| | | TTTGGATAGAGAGCAATGGAAAAAAGATTTGCCTGCATTTGCCTCTCTAAGCGC |
| | | AAAGGATGATGCTGATAAATCCAAAGCAGGAAGAGGAAGAAAAAAACAATAA |
| 18 | 2 | ATGGAACAATTTACAAATCTTTTTCAGTTATCAAAAACATTGAAGTTTGAATTG |
| | | AAACCCATTGGTAAAACGGAAGAAACTTTTAAACAGTGGCTGGAGGAAATTCA |
| | | AAAATCTGAATTAGATGTTTATAATGATAGCAACTTGTTTCTGAAAGATAAGAA |
| | | AATCAAAGATGCCTATTTGGCTATTAAGCCGATTATGGACAAGTTGCATGAACA |
| | | GTTTATTGAAGAGTCTTTGACGTCTGATTTGGCCAAAAATATCGATTTCTCGGA |
| | | ATACTATGAAGCTTTTAGAAATAAGACTGTAAAGGATGAGATGGAAACGAAAT |
| | | TGCGGAAGGTTTTTGCCGAGACCTACCAATATGCAGGCAAACTTTTTATAGATA |
| | | TGATTTCTAAAGCCCAAAAAAACGGCAAAGAAATCAAGACTAAAAAGGAAAA |
| | | ACCATACGAGTGCCTTACCGATTCTAAAATACTTAACTTTTTATCTGCAAACGT |
| | | AAAGGAATTGGCAAAACTTACAGATGCTAATGAGCAAGAACTGACTAATCATA |
| | | TAAAGCAGTTCCGTGGTTTTTGGGGATATTTAGATGGTTTCAATACAAACAGGG |
| | | AAAACTATTATGTAACAGAGAAAGAGCAGTCTACAGCTGTTGCCACTCGTATT |
| | | GTCCATGAAAACTTGCCCACATTCTGCAGCAATGCTTTACGTTTTGAAAAGCGC |
| | | AGGGAAGAGTATCTCGGTATTTATCAGTATCTAAAAGATAATAACCGCGAGAC |
| | | CAAAATTAAGAACTCGCAGGGCGAAGAGATAGAAGCGGAGTCCATTGACGTA |
| | | AGTTATTTCGAAATAGAGCATTTTAATGAATGCCTTGCACAGTCTCAAATAGAT |
| | | GAGTATAATCGTGTCATCAGCCATTATAACCTATTGATTAATCTTTACAATCAG |
| | | GCACGTCGCGAAGAATCGCAATTTAAAAAGATTGACGAATTCGAAATCCTCTA |
| | | TAAGCAAATTGGTTGTGGCAAAAAGCAATCAATGTTTGAAATCTTACAAAGTG |
| | | ACAATGATGTGAGAAATTTATTACAAAAAGTAAGACGTGCTGGTGATATAATG |
| | | TTTAAAAAAGGCCATAGTGAAGGCGAAATAGATAATGTCTACGATTTTATCCA |
| | | ATTCTTGAAAGAATGTGATAATTGGGAAGGAATCTATATGTCAAATGCTGCTAT |
| | | TAATAAGATTTCAAATTTATACTTTGCCAATTGGCACAGCATAAAAGACAAATT |
| | | AAAGGAGTCAAAGGCAAATGCATGTATTACATACGACAAAAAACGTGAAGAG |
| | | CCAATCAAATTACGTGATGCCGTGGAGTTGTCTGGCTTGTTTGAAGTGCTGGAT |
| | | CAGGAACAGCCAGAACACATTCTCAAAGAATCGCTTTTCAAAGATGAGGCCAC |
| | | TAATGAGTATCGTGGTGTTTTGAAAAAGGAACTTTCTCCGAGTAAGAATATCAT |
| | | AATGCTATTGTGCTATGATATTGAACGTAATACAAAGGCTTTTTTGGATTCTTCA |
| | | GATAGCATTGTTGCAATAGAAAAGTTTAAAGACAAGAAACAGTTTGTAGGAGA |
| | | AGAAGACCAAACGATAAAACAAGTAAAAGATTGGCTTGATGCGGCAACAGAC |
| | | GCTATGCGTATAGTTCGTTATTTTGCTGTGCGTAAAAGTAAAATGAAGGGGAAC |
| | | TTACCAAATGTAACGATGGAACAAGCGTTGAGCAACCTTCTACATAATGAAGA |
| | | TGCACAATGGTTTAAATGGTATGACCTTATCCGTAACTATCTTACCAAGAAGCC |
| | | GCAAGATGATGCAAAAGAGAACAAACTAAAGCTTAATTTTGGCACTTCTTCTTT |
| | | ACTTGGCGGCTGGAGTGACGGACAGGAGAAAACAAAAGCTGCTACTTTATTGA |
| | | GGAATAATAATGCCTTATATCTATGTATATTAAAAACGAAAAACGTTTTTGACA |
| | | CGTCAAAGGATAATAATCCCATTTATAATGTTTCACAATCAAATGCAAGTCGCT |
| | | TGATTTTAAGAAATCTCAAATTTCAGACACTTGCAGGGAAAGGCTTTTTAGGTG |
| | | AGTATGGTATTTCTTATGGAGAGATGGGGAAAAATGATTCTACCAAAGCAATT |
| | | AGTTGTTTACAAAAAATCATAAAAACGCGATATGTGGATAAATATCCTTTACTG |
| | | GAGAAATTTGTAACAAACACATATACAGATAAGCGTGAATTCGATGCTGAGAT |
| | | TCTCGAGACATTGAAAGAATGTTATGTCTGCGAGTTCAAACCAATAGATTGGAC |
| | | TTTTGTCATTGAAAAACAAAATGCCGGTGAGTTGTTTTTGTTTAAAATATCTAGT |
| | | AAAGATTACTTACCAAACGCTAAGGGTAGAAAAGATTTGCAGACAATGTATTG |
| | | GGAAGATGTGTTGTCTGATGGTAGTAAACATCAATTGTGCGCAGGTGCCGAAA |
| | | TCTTTATGCGCGAGCCAGTCGCCAAAGAGTCACCAGTGATGCATAGAATAGGA |
| | | TCAAAACTCGTAAACAGGAGAGACAAAGACGGAAACACTATTCCAGAGCATAT |
| | | ATATAGAGAAATTTATTCTTATGTTAATGGCAAAATGAGTGTCGTTTCAGCTAA |
| | | AGCCCAAAAGTATATAGATGACAAAAGAGTGATTGTCAAGGATGTAAAGCATG |
| | | AAATTGTCAAAGACAAGCGCTTTTATGGTGAAACGAAATATATGTTCCATTGTC |
| | | CAATTAAGTTGTATTTTGAGGCAAAAGATCCCAAATATGCATTCTCGGAAGTTA |
| | | ATAAAACAATAACAGATTCGCTTCAACAGTCCCCCAATTTGCAATTTATAGGCA |
| | | TAGATCGTGGCGAAAAGCACCTTGTATATAGTTGTACGGTTGATACGAATTGTA |
| | | AAATCATCAGATGTAACCATCATGATTTTATCAATGGGACCGACTATGTGCAGA |
| | | AATTGGATGCAGTTGCTAATGATCGCATCATTGCTAAAAAGAATTGGCAAGCC |
| | | CAGAGTAAAATTAAGGATTTGAAAAGTGGTTATATATCGCATGTGGTACATCGT |
| | | TTAGTGGATGAAACCATAAAAGACGGTAACGTAATTGCCCCACACGCGTATAT |
| | | TGTCTTGGAAGACCTGAACACGGAAATGAAGCGAGGCCGCCAAAAGATAGAA |
| | | AAGCAAGTCTACCAAAATTTGGAAGTTGCCCTTGCCAAGAAATTAAATTTTGTA |
| | | GTAGATAAAAACGCCAAGCATGGAGAACTAGGTTCAGTGAGCATGGCATTGCA |
| | | GCTTACGCCGCCAATCAACAACTACCAAGATATTGAGGGTAAAAAACAATTTG |
| | | GAGTAATGCTTTACACACGAGCCAATTACACATCGGTGACCGATCCTGCAACA |
| | | GGATGGCGTAAAACCATCTATATAAAGAATGGAAAAGAAGAAGATATAAGAA |
| | | AACAAATTCTCGAAGCATTTCGCGACTTTGGCTTTGACGGCAGGGATTATTACT |
| | | TTGAATATACTGAAGCCAATGTGGGGCACACTTGGCGTATGTATTCTGGCAATA |
| | | ATGGTAAACCTCTACCTCGCTTCCGGAACAGAAAACAGATATTCCAGGACAAG |
| | | AATGTATGGGTATCAGAGCAAATTAATGTAGTGGAGATCCTCGACAGGCTGTTT |
| | | GTCAAATTCGATAAAAAGAAATCTTTCAAGGAGCAGATAGAACAGGGCAAAG |
| | | AACTTGAAAAGGTAGAATGGCGAGACGAGTCCGCTTGGCAATCTTTTCGATTTG |
| | | CGCTTGATTTGATTCAGCAAATTCGCAATTCTGGTACGGAAGACAACGATGATA |
| | | ATTTCTTGTATGCTCCAGTGCGCAACGACCACGGCGAACACTTTGACACACGCA |
| | | ATCATAAGAATAATGGCGAATTATCTGAAATCAGAGATGCTGATGCTAATGGA |
| | | GCATACAATATTGCTCGCAAAGGATTGATAATGGATGCTCATATTAAGCGTTGG |
| | | ATTGAAATCGGCTGTCCCACAGTGAGTGAAGATAAAGCGCCAGATTTAGATTT |
| | | ATTTATCTCAGATTTGGAATGGGATTTGTGGCTTCTGGATAGAGAACGTTGGGA |
| | | AAAAGAACTACCCATCTTCGCATCACGGAGTGCAAAGAAGAAAGAAGATAAA |
| | | CAGCAAACGAGAGGGAAAAAACAATAA |
| 19 | 3 | ATGAAAGAATTTACGAACCTGTATCAGTTATCAAAAACTCTGAGATTTGAACTG |
| | | AAGCCTATTGGCAAGACCGCAAAAACCTTTCAAAGATGGCTTGAGGAAATGAA |
| | | TAAAGCCGAACTTGTTGGTGATAATGATGGCAACTTATTTTTGAAGGACAAGAA |
| | | AATTAAGAATGCCTATTTGGCTATTAAACCAATAATGGACAAACTGCATGAGC |
| | | AGCTTATAGAGATGGCTTTGCTTTCTAAAGAAGCAAAACAAATTGATTTTTCGG |
| | | AATATTTTGAAGCATATAAGAATAAAGCCGTAAGGGTTGAAATGGAAAATGGC |
| | | TTGCGGAAAGCATTCGCAAAACCATTTCAATATGCAGGCCTATACTTTGTCGAA |
| | | GAGATTTCTAAATCCCAAAAGAATGGGAAAGAGATCAAGACTAAAAAAGATA |
| | | AGCAATACGAATGTCTCACCGATGCGAAGATGTATAATTATCTATCAGCACATG |
| | | TCAGGGATTTAGCTGAACAGAACGGTATTGATGAACAAAAACTTAAGAAACAT |
| | | ATTGAACAATTCAAAGGCTTTTGGGGGTATTTGGATGGGTACAACCAAAATAG |
| | | GGAGAATTATTATGAGGTTGACAAAGAGGCTTCAACCGCTGTTGCCACACGTA |
| | | TTGTTCATGAAAACTTACCCACTTTCTGTAGCAATGCTATGCGTTTTGAAAAGC |
| | | GCAAGGATGAATATCTCTGTATTCATCGATATTTGAAAGATAATAGCCGTGAAA |
| | | CGAAGATTAAAAACACGAAAGGCGAAGAGATTGATGTAGAAGCGATTTCCGAT |
| | | AATATTTTTCAAATAAAGCATTTTAACGAATGCCTTGCTCAGTCACAAATTGAA |
| | | GAGTACAACCGCATTATTGGCAATTACAATATGCTGATTAATTTATACAATCAG |
| | | TTGCGACGTGGCGAAAAGGATTTTAAGAAAATTGACGAATTTGAAAAATTAAA |
| | | AAAGCAAATTGGTTGCGGCAAAAAGAAATCAATGTTTGAGACATTGCAGGGGG |
| | | ATAGCGATGTGAAAAAACTTCTGCTAAAAGCAAGTGAAGCAGGAAAACAGAT |
| | | GTTTAAGGATGTCGCTGATTTCTCAGAAATTAAAACGGTGCCAGATTTTATTGA |
| | | ATTCTTGAGAGAATGCGATAATTGGGATGGCATTTATATGTCGAAAACAGCGAT |
| | | TGACAAAATATCTAGCTTGTATTTTGCCAACTGGCACAGCATCAAGGATAAATT |
| | | AAAAGAAGCTAAAGCGGATGCCTGTATCACATACGAAAAGAAACGTGAAGAA |
| | | CCTATAAAATTACGTGATGCAGTGGAATTGTCTGGGTTGTTTGCCGTGTTGGAT |
| | | TCTGAGCAATCTGAACATTTTTTCAAAGATTCGTTATTCAAAGATGATGATACC |
| | | AACGACTATCGTGGTGTTTTGAATAAAACTCTTACGCCAAGCAAGAACCTCATC |
| | | CAATTGCTGTGTTTTGATATTGAGAGAAATACGAATGCATTTCTATCTAAATCT |
| | | AATAACATTGTTAAATTAGAAAAGTATAAGGACGAAAACGATCAGGCTGGTGA |
| | | AGAAGACCAAACGATTAGGAAAATAAAAGAATGGTTTGATGCGGCAACCGAT |
| | | GCTATGCGTATTGTGCGCTATTTCTCCGTGCGCAAAAGCAAAATGAAAGGTAAT |
| | | ATTCCAAATGCCACAATAGAACAGGCGTTGAGCAATCTGTTATACAACGATGA |
| | | TGCACAGTGGTTTAAGTGGTATGACCTCATCCGCAATTATCTAACCAAGAAACC |
| | | GCAAGACGATGCAAAAGAAAACAAGTTGAAGTTGAATTTTGGGACTTCGTCTT |
| | | TACTAGGTGGTTGGAGTGATGGACAAGAAAAAACAAAAGTCGCCACCTTATTA |
| | | AAGTACCATGATGAAATATATTTATGTGTATTGAAGACCAAGAATATTTTTGAT |
| | | ACATCAAAGGATAATAATCCGATTTATGACATAACGGAATCAGAAGCAAGTCG |
| | | CCTGTTATTAAGAAACCTGAAGTTCCAAACTCTTGCAGGAAAAGGCTTTTTGGG |
| | | AGAATATGAAATTTCATATGGCGATATGGGGAAAGAAAATCCAACCAAAGCAA |
| | | TTAAGTGTTTACAGAAAATAATTAAAGAACGATACGTAAACAAATATCCCTTAT |
| | | TGGAGAAATTTGCAAGAAATACCTATACAGACAAAGCTCAATTCGATGCAGAA |
| | | ATTACAGAAACATTAAAAGAATGTTATGTCTGTCAATTTGTTCCAATAGATTGG |
| | | AATGTTGTTACTGAAAAACAAGATAATGAGGAATTATTCTTGTTCAAAATACTC |
| | | TGCAAGGATTATAGGCCGAAAAGCGTTGGAAAGAAAGATCTACAAACAATGTA |
| | | TTGGGAGGACGTGTTGTCAGATGGAAGCAAACATCAATTGTGTGCTGGTGCCG |
| | | AAATATTTATGCGTGAACCAGTAGCAAAGGAATCACCAATTATACATAGAATC |
| | | GGTTCTAAGTTTGTAAACAAACGAGACAAAGACGGCGATACTATTCCAGAACA |
| | | GATTTATAGAGAAATATATTCGTATGCCAATGGTAAGAAGAAAACAATATCCG |
| | | CTGAATCTAGAAAGTATATTGATGAACAAAAGGTGATAATTAAAGATGTGAAG |
| | | CACAAAATCATTAAGGATAATCGGTTTTATGGTGAAACAAAATACATGTTCCAT |
| | | TGCCCAATTAAATTGCAATTTGAAGCTAAAGATCCTAAATACGCTTATTCGGAA |
| | | GTAAACACAACCGTCAGCAACGCACTTCAGCAATCTGACAACCTACAATTTATC |
| | | GGCATAGACCGTGGTGAAAAGCATCTTGTTTATAGTTGTATAGTTGACAAGGAT |
| | | TGCAAGATACTAAAGTGTGGTCATCACGACGTTATCAATGGAACGGACTATGTT |
| | | CAAAAATTAGAGGCTGTTGCCGACGAACGCATTGTTGCCAAAAAGAATTGGCA |
| | | ACAGCAGAACAAAATCAGAGATCTGAAAAACGGCTATATATCGCATGTGGTAC |
| | | ATCGCTTGGTAGAGGAGACAATAAAAGATAACGGAAAAATAGCTCCACACGCA |
| | | TACATTGTTTTGGAAGACCTGAATACAGAAATGAAACGTGGTCGCCAAAAGAT |
| | | TGAGAAACAGGTTTATCAAAACCTGGAAACAGCGCTTGCAAAAAAACTCAATT |
| | | TTGTAGTGGATAAAGATACTAAGAAAGGTGAAATAGGATCTGTAAGTAAGGCA |
| | | TTACAACTTACGCCCCCTATCAATAACTACCAAGACATTGAAGGTAAGAAACA |
| | | ATTTGGCGTAATGCTATATACTCGAGCCAATTATACGTCAGTCACCGACCCCGC |
| | | AACAGGTTGGCGCAAAACCATCTACATTAAGAATGGCAAAGAAGATGATATTA |
| | | AAAATCAGATTCTTGACAAATTCAGCGACTTTGGCTTTGATGGAGATTATTATT |
| | | TTGAATACACAGAAGCCAATGTGGGACACACTTGGCGTTTGTATTCTGGTAAAA |
| | | ATGGCAAAGCATTGCCACGTTTCCAAAACAAAAAGCAAGCGCTTCAAGATAAA |
| | | AATGTTTGGGTGCCAGAAAAGATCAATGTAGTTGATATCCTCAATAAGCTTTTT |
| | | GCGAAGTTTGACAAGAAGAAATCCTTTAAATCACAAATTGAAGCTGGAGTTGA |
| | | ATTACAAAAAGATGAGGAACGTAATGAAACAGCTTGGCAATCGTTACGCTTTG |
| | | CACTTGATTTGATTCAGCAAATCCGTAATTCGGGTGAGAAGAATTCCGGAGATG |
| | | ATAATTTCTTGTACTCTCCTGTCCGCAACGATAAAGACGAACACTTTGACACGC |
| | | GTAATTATAAAAATAATGGCGAACTATCAGAAATCAGAGATGCCGATGCAAAC |
| | | GGTGCATACAACATTGCTCGCAAGGGCTTAATTATGGATACACACATAAAGCA |
| | | TTGGATTAATAATGGGCGACCCAAAACGAAAATTGATGGCAGCGAAGTCTCTG |
| | | ATTTGGATTTGTTTATTTCCGATAGAGAGTGGGATTTGTGGCTTTTAGATAGAG |
| | | AACAATGGATGAAAGAATTGCCCACATTCGCTTCGAAAATTGCAAAATACGAC |
| | | AGCGACGCCCCTCAAACTGCAAAAAGAAGAAAGAAGAGATAA |

### Group 2 Sequences (SEQ ID Nos: 20-31)

TABLE S2A
Enzyme sequences Group 2

| SEQ | |
|---|---|
| ID NO | Sequence |
| 20 | MEMRLMVVFEDFTKQYQVSKTLRFELIPQGKTLENMERAGIVKGDCQRSEDYQEAKKIID |
| ID415 | KIYKHILNSSMAKVEIDWSTLAEATKEFRKNKDKKKYENVQVRVRKKLLEDIKNQTITVE |
| | KGAKDLYKAMFEKEIVTGEVCAAFPEIDLTDEEKAILDKFKKFTTYFTGFFENRKNIFTDEG |
| | ISTSFTYRLVNDNFIKFYDNCNLYKDIIASVPGLKGEFKKCFKDLQLFSKCRLEEIFETSFYN |
| | HILTQDGIDEFNQLLGGISAKEGEKKKQGLNEVINLAMQKDEGIRNKLRYRAHKFTPLFKQ |
| | ILNDRSTLSFIPETFENDRKVLESIEAYKLYLSEQNILEKAQELLCSMNRYDSRKLSIDGKYIS |
| | KLSQAIFNSWSKIHDGIKDYKKSLLPKETKKALKGIDMELKQGVSVQDILDALPEENFHEVI |
| | VDYTHNLVQKCQAVLSGSLPGNIETDKDKTDIKLVMDPLLDLYRFLEIFSHDNSQGVKTAF |
| | EEQLMEILADMKEIIPLYNKVRNFATKKAYSVEKFKLNFNVATLASGWDQNKENANCAIIL |
| | RKKDMYYLGIYNSSNQPFFEIVEQDDDGFEKMIYKQFPDFNKMLPKCTVSRKNDVAVHFN |
| | KSDADFLLNVNTFSKPLLITKEVYDLGTKTVQGKKKFQIDYKRNTGDEAGYKAALKAWID |
| | FGKEFIKAYESTAIYDISLLRKSEDYPDIQSFYKDVDNICYKIAFQKISDEAVNQCVENGSLY |
| | LFKLHAKDFSPGASGKPNLHTLYWKYVFEEENLKDVVVKLNGQAELFYRPRSLTQPVVH |
| | KKGEKILNKTTRSGEPVPDDVYVELSHFIKNGSTGNLSNEAKKWQAKVSVRNVPHEITKD |
| | RRFTQDKFFFHVPLTLNYKSANTPRRFNDLVKAYIKKNPDVHVIGIDRGERNLIYAVVIDG |
| | KGKIVEQRSFNIVGGYNYQEKLWQKENERQAARRDWTAVTTIKDLKQGYLSAVVHELSK |
| | MIVKYKAIVVLENLNAGFKRMRGGIAERSVYQQFEKALIDKLNYLVFKDAVPAVPGGVLN |
| | AYQLTDKFDSFSKMNQQTGFLFYVPAAYTSKIDPLTGFVDCFNWKQIKKNTESRKAFIGLF |
| | ESLCYDANTNNFVLHYRHKANRYVRGGNLDITEWDILIQENKEVVSKTGKSYRQGKRIIY |
| | RKGSGNHGEASPYYPHEELQSLLEEHGISYKAGKNILPKIKAANDNALVEKLHYIIKAVLQ |
| | LRNSNSETGEDYISSPVEGRKDWCFDSRAADDALPQDADANGAFHIAMKGLLLMKRIRND |
| | EKLAISNEDWLNYIQGLRS |
| 21 | MRDVVTFENFTKQYQVSKTLRFELIPQGKTLDNMKRDGIISVDRQRNEDYQKAKGILDKL |
| | YKYILDFTMETVVIDWDELATATEDFRKSKDKKAYEKVQSKIRTALLEHVKKQKVGTEDL |
| | FKGMFSSKIITGEVLAAFPEIRLSDEENLILEKFKDFTTYFTGFFENRKNVFTDEALSTSFTYR |
| | LVNDNFIKFFDNCIVFKNVVNISPHMAKSLETCASDLGIFPGVSLEEVFSISFYNRLLTQTGI |
| | DQFNQLLGGISVKEGEHKQQGLNEIINLAMQQNPEVKEVLKNKAHRFTPLFKQILSDRSTM |
| | SFIPDAFADDGEVLSAVDAYRKYLSEKNIGDRAFQLISDMEAYSPELMRIGGKYVSVLSQL |
| | LFNSWSEIRDGVKAYKESLITGKKTKKELENIDKEIKYGVTLQEIKEALPKKDIYEEVKKYA |
| | MSVVKDYHAGLAEPLPEKIETDDERASIKHIMDSMLGLYRFLEYFSHDSIEDTDPVFGECL |
| | DTILDDMNETVPLYNKVRNFSTRKVYSTEKFKLNFNNSSLANGWDKNKEQANGAILLRKE |
| | GEYFLGIFNSKNKPKLVSDGGAGIGYEKMIYKQFPDFKKMLPKCTISLKDTKAHFQKSDED |
| | FTLQTDKFEKSIVITKQIYDLGTQTVNGKKKFQVDYPRLTGDMEGYRAALKEWIDFGKEFI |
| | QAYTSTAIYDTSLFRDSSDYPDLPSFYKDVDNICYKLTFEWIPDAVIDDCIDDGSLYLFKLH |
| | NKDFSSGSIGKPNLHTLYWKALFEEENLSDVVVKLNGQAELFYRPKSLTRPVVHEEGEVII |
| | NKTTSTGLPVPDDVYVELSKFVRNGKKGNLTDKAKNWLDKVTVRKTPHAITKDRRFTVD |
| | KFFFHVPITLNYKADSSPYRFNDFVRQYIKDCSDVKIIGIDRGERNLIYAVVIDGKGNIIEQRS |
| | FNTVGTYNYQEKLEQKEKERQTARQDWATVTKIKDLKKGYLSAVVHELSKMIVKYKAIV |
| | ALENLNVGFKRMRGGIAERSVYQQFEKALIDKLNYLVFKDEEQSGYGGVLNAYQLTDKFE |
| | SFSKMGQQTGFLFYVPAAYTSKIDPLTGFINPFSWKHVKNREDRRNFLNLFSKLYYDVNTH |
| | DFVLAYHHSNKDSKYTIKGNWEIADWDILIQENKEVFGKTGTPYCVGKRIVYMDDSTTGH |
| | NRMCAYYPHTELKKLLSEYGIEYTSGQDLLKIIQEFDDDKLVKGLFYIIKAALQMRNSNSE |
| | TGEDYISSPIEGRPGICFDSRAEADTLPYDADANGAFHIAMKGLLLTERIRNDDKLAISNEE |
| | WLNYIQEMRG |

TABLE S2B
Human Codon Optimized Nucleotide Sequences Group 2

| SEQ | Corresponding | |
|---|---|---|
| ID NO | AA | Sequence |
| 22 | 20 | ATGGAAATGAGGCTGATGGTTGTTTTTGAGGATTTTACCAAGCAGTACCAAGTA |
| | | TCTAAAACGCTGCGCTTTGAACTCATCCCCCAGGGCAAGACGCTGGAGAATAT |
| | | GGAAAGGGCTGGGATCGTGAAGGGTGACTGTCAAAGATCCGAGGATTATCAGG |
| | | AAGCCAAGAAGATTATCGACAAGATCTACAAACACATCCTGAACAGCAGCATG |
| | | GCCAAGGTGGAGATCGACTGGTCTACTCTCGCCGAGGCAACCAAGGAGTTCCG |
| | | TAAGAACAAGGATAAGAAGAAGTACGAGAACGTCCAAGTGCGGGTGCGGAAG |
| | | AAGTTACTTGAGGACATTAAGAACCAGACTATTACCGTGGAGAAAGGTGCAAA |
| | | AGACTTGTATAAGGCTATGTTTGAGAAGGAAATCGTGACAGGAGAGGTTTGCG |
| | | CAGCCTTCCCTGAAATTGATCTGACGGATGAGGAAAAAGCCATCCTCGACAAG |
| | | TTCAAAAAGTTCACCACATACTTTACAGGCTTTTTTGAGAACCGCAAGAATATC |
| | | TTCACAGACGAGGGAATCTCAACTTCCTTTACTTACAGGCTGGTTAATGACAAC |
| | | TTCATTAAGTTCTACGACAACTGCAACCTTTATAAGGACATCATTGCCAGTGTG |
| | | CCCGGATTGAAAGGTGAGTTCAAGAAGTGTTTTAAGGACTTGCAGCTGTTTTCC |
| | | AAGTGCCGACTTGAAGAGATCTTTGAGACATCCTTTTACAACCATATCCTTACA |
| | | CAAGACGGGATCGACGAGTTTAACCAGCTGTTAGGGGGGATTTCTGCTAAAGA |
| | | GGGCGAAAAAAAGAAACAGGGCCTGAACGAGGTGATAAATTTGGCTATGCAG |
| | | AAAGACGAGGGAATTCGAAACAAACTCCGCTATAGAGCACACAAATTTACCCC |
| | | TTTGTTCAAGCAGATTTTAAACGATCGGAGCACCCTGAGTTTTATTCCAGAGAC |
| | | ATTTGAGAACGACAGAAAGGTGCTTGAGAGTATTGAAGCTTACAAGCTCTATCT |
| | | GTCCGAGCAGAATATTCTTGAAAAAGCCCAGGAACTGTTATGTTCAATGAACC |
| | | GGTACGACTCTCGTAAACTCAGCATCGACGGCAAATATATCTCAAAACTCAGTC |
| | | AGGCGATCTTCAACAGTTGGAGCAAAATCCATGATGGCATCAAGGACTATAAG |
| | | AAGAGTCTGCTTCCTAAAGAGACAAAGAAAGCCTTAAAAGGCATTGATATGGA |
| | | GCTAAAACAGGGAGTGTCTGTCCAGGACATCCTGGATGCCCTACCCGAAGAGA |
| | | ATTTTCACGAAGTGATTGTTGATTACACTCACAACCTAGTGCAAAAGTGTCAAG |
| | | CTGTCCTGTCAGGGTCACTTCCAGGTAACATCGAAACAGATAAAGACAAGACC |
| | | GATATTAAGCTTGTCATGGACCCCTTACTGGATCTCTACAGGTTCCTGGAGATA |
| | | TTCTCACATGATAATAGCCAGGGGGTGAAGACGGCTTTTGAAGAACAGCTCAT |
| | | GGAGATTCTGGCTGATATGAAGGAGATCATACCACTTTATAACAAGGTTAGGA |
| | | ACTTTGCGACGAAAAAGGCTTATTCCGTCGAAAAGTTCAAGCTCAATTTCAATG |
| | | TTGCGACACTCGCCTCTGGGTGGGATCAGAACAAAGAAAACGCCAATTGCGCA |
| | | ATTATTCTCAGAAAGAAGGACATGTACTACCTCGGAATCTACAACAGCTCCAAT |
| | | CAGCCATTCTTCGAGATCGTGGAGCAGGACGACGACGGGTTCGAGAAAATGAT |
| | | TTACAAACAATTCCCTGACTTCAACAAGATGTTGCCCAAGTGTACCGTGAGCAG |
| | | GAAGAATGACGTAGCGGTTCATTTTAATAAGTCCGACGCCGACTTCCTCCTAAA |
| | | TGTGAACACCTTCTCCAAGCCGCTCCTGATAACAAAGGAAGTATATGACCTCGG |
| | | CACGAAGACCGTGCAAGGCAAGAAGAAATTTCAAATTGACTACAAGCGCAATA |
| | | CCGGCGATGAGGCTGGATACAAAGCAGCACTGAAGGCGTGGATCGATTTCGGC |
| | | AAAGAGTTCATTAAAGCCTATGAAAGTACAGCCATCTATGATATAAGCCTGCTC |
| | | AGGAAGAGCGAAGACTATCCAGATATACAGTCTTTCTATAAGGACGTCGATAA |
| | | CATCTGCTACAAAATAGCGTTCCAGAAGATTTCAGATGAGGCAGTTAATCAGTG |
| | | TGTTGAAAATGGCTCTCTGTACTTGTTCAAACTCCACGCTAAGGATTTTTCACCT |
| | | GGAGCATCCGGCAAACCCAATCTTCACACTCTGTACTGGAAGTATGTATTTGAA |
| | | GAGGAAAATCTGAAGGATGTCGTCGTCAAACTTAATGGGCAGGCCGAACTGTT |
| | | CTATCGCCCACGGTCACTGACCCAACCCGTGGTCCACAAGAAAGGCGAAAAAA |
| | | TCTTGAACAAAACCACCCGGTCAGGTGAGCCTGTACCAGATGACGTCTACGTG |
| | | GAACTCTCACATTTTATCAAAAACGGTTCTACTGGCAATCTGAGTAATGAAGCG |
| | | AAAAAATGGCAGGCTAAGGTGAGCGTGAGGAACGTACCCCACGAAATTACTAA |
| | | AGATCGCCGCTTCACTCAAGACAAATTCTTCTTTCATGTGCCTCTGACACTGAA |
| | | CTATAAAAGCGCAAATACCCCACGAAGATTCAATGATCTGGTTAAGGCTTACAT |
| | | CAAGAAAAATCCAGACGTCCATGTGATCGGGATCGACCGGGGTGAGCGGAACT |
| | | TGATTTACGCTGTGGTAATCGACGGGAAAGGGAAGATCGTGGAGCAGAGATCG |
| | | TTCAACATAGTGGGAGGATACAACTACCAGGAAAAACTGTGGCAGAAAGAGA |
| | | ATGAAAGGCAGGCTGCTCGTCGAGATTGGACTGCCGTGACCACAATAAAAGAT |
| | | CTGAAACAGGGCTATCTCAGCGCTGTGGTGCACGAACTTTCCAAGATGATAGTA |
| | | AAATACAAGGCCATTGTCGTCCTGGAGAATTTAAATGCGGGATTTAAGCGAAT |
| | | GAGAGGCGGTATTGCAGAAAGATCCGTGTACCAGCAATTTGAGAAAGCTCTAA |
| | | TTGACAAGTTGAATTACCTGGTTTTCAAGGACGCCGTACCTGCAGTGCCGGGAG |
| | | GAGTCCTCAACGCCTATCAGCTTACCGACAAGTTTGATTCCTTTTCCAAAATGA |
| | | ACCAGCAAACAGGGTTCCTGTTTTACGTCCCCGCCGCATACACTAGCAAGATTG |
| | | ACCCTTTGACCGGATTCGTGGACTGCTTTAACTGGAAACAGATCAAAAAGAAC |
| | | ACCGAGAGTCGAAAGGCATTTATCGGGCTATTCGAATCTCTGTGCTATGACGCA |
| | | AATACTAATAATTTCGTGTTGCATTACCGGCACAAGGCCAATAGGTATGTTCGC |
| | | GGGGGGAATCTGGATATTACTGAGTGGGATATCCTTATCCAGGAGAACAAGGA |
| | | AGTCGTTTCCAAAACCGGCAAATCCTATCGTCAGGGCAAAAGAATAATCTATC |
| | | GGAAGGGAAGCGGCAACCATGGCGAAGCCAGCCCTTACTACCCGCACGAGGA |
| | | GCTGCAGAGTCTCCTGGAGGAGCACGGTATCTCTTACAAGGCTGGGAAAAACA |
| | | TACTGCCCAAGATAAAGGCTGCAAATGACAACGCCCTAGTCGAGAAACTGCAC |
| | | TATATTATAAAAGCTGTGCTACAGCTGAGGAATAGTAATTCTGAGACTGGAGA |
| | | AGATTATATTTCGTCTCCGGTGGAGGGCCGCAAAGATTGGTGCTTCGATAGCAG |
| | | AGCCGCCGATGATGCCTTGCCCCAGGATGCCGATGCCAACGGTGCCTTTCATAT |
| | | AGCCATGAAAGGCCTGTTATTAATGAAACGGATCAGAAATGATGAGAAGCTGG |
| | | CAATCTCGAATGAAGACTGGTTGAACTATATTCAAGGACTGCGCTCTTGA |

TABLE S2C
Direct Repeat Group 2

| SEQ | | SEQ | |
|---|---|---|---|
| ID | Direct Repeat | ID | Direct Repeat |
| NO | (Variant #1) | NO | (Variant #2) |
| 24 | ATCTACGAGAGTAGAAATTAACA | 25 | TCTACGAGAGTAGAAATTA |
| | TTGTCAGTTAGAC | | ACATTGTCAGTTAGAC |
| 26 | ATCTACGAGAGTAGAAATTAACA | 27 | ATCTACGAGAGTAGAAATT |
| | TATACTGTCAGAC | | AACATATACTGTCAGAC |

TABLE S2D
crRNA Sequences Group 2

| SEQ | | |
|---|---|---|
| ID | | |
| NO | Sequence | FIG. |
| 28 | GUCUAACUGACAAUGUUAAUUUCUACUCUCGUAGAU | FIG. 2A |
| 29 | GUCUGACAGUAUAUGUUAAUUUCUACUCUCGUAGAU | FIG. 2B |

TABLE S2E
Native Nucleotide Sequences Group 2

| | Corres- | |
|---|---|---|
| SEQ | ponding | |
| ID NO | AA | Sequence |
| 30 | 20 | ATGGAGATGAGATTAATGGTTGTATTTGAGGATTTCACAAAACAGTATCAA |
| | | GTGTCGAAAACATTAAGATTTGAATTGATTCCCCAAGGAAAGACCTTGGAA |
| | | AATATGGAACGGGCAGGTATTGTAAAAGGAGATTGTCAACGTAGTGAGGAC |
| | | TATCAAGAAGCAAAGAAAATTATCGATAAAATTTATAAACACATTTTAAAT |
| | | TCATCCATGGCTAAGGTTGAAATTGATTGGTCAACCTTAGCGGAAGCAACT |
| | | AAAGAATTTAGGAAAAATAAGGATAAAAAGAAATATGAAAATGTTCAAGTT |
| | | CGTGTTAGAAAGAAACTGCTTGAAGATATAAAAAATCAAACAATCACAGTA |
| | | GAAAAGGGGGCGAAAGATCTTTATAAGGCAATGTTTGAGAAAGAAATCGTT |
| | | ACGGGGGAAGTATGTGCTGCATTTCCCGAAATAGATTTAACGGATGAAGAA |
| | | AAAGCCATATTGGATAAATTTAAAAAATTTACAACGTATTTTACAGGATTCT |
| | | TTGAAAACAGAAAAAATATCTTTACTGATGAAGGTATCAGTACTTCTTTTAC |
| | | GTATCGACTGGTAAATGATAATTTTATAAAATTTTATGATAATTGCAATCTT |
| | | TATAAAGATATTATTGCCTCTGTTCCGGGATTGAAGGGCGAGTTTAAGAAAT |
| | | GTTTTAAAGACTTACAGCTTTTTTCTAAATGTAGACTAGAAGAAATCTTTGA |
| | | GACTTCTTTTTATAATCATATTTTGACACAAGACGGTATCGATGAATTTAAT |
| | | CAACTCTTGGGCGGAATTTCCGCAAAAGAGGGAGAAAAAAAGAAACAAGG |
| | | CTTAAATGAAGTTATCAATTTAGCTATGCAAAAAGACGAGGGAATTAGAAA |
| | | TAAGTTAAGATATAGAGCTCATAAATTTACGCCTCTTTTTAAACAAATTTTA |
| | | AATGACCGGTCTACCTTGTCATTTATACCCGAAACTTTTGAAAATGACCGTA |
| | | AAGTTTTGGAGTCTATAGAGGCATATAAATTATATTTATCTGAACAGAATAT |
| | | ATTAGAAAAAGCACAAGAATTACTGTGCAGCATGAATCGGTATGATTCTCG |
| | | AAAGTTAAGTATTGACGGTAAGTATATTTCAAAGCTGTCTCAGGCTATCTTT |
| | | AACTCTTGGAGTAAGATTCATGATGGAATAAAAGATTATAAGAAGTCTTTA |
| | | CTTCCTAAAGAAACGAAAAAAGCTTTGAAAGGCATTGACATGGAATTAAAG |
| | | CAGGGAGTAAGCGTGCAGGACATATTGGACGCACTTCCTGAAGAAAATTTT |
| | | CATGAAGTTATAGTTGATTATACTCATAATCTTGTGCAAAAATGTCAAGCTG |
| | | TATTGAGCGGGTCTTTGCCTGGTAATATTGAAACGGATAAAGATAAAACAG |
| | | ATATTAAGCTAGTAATGGACCCACTGTTGGATTTGTATCGGTTTTTAGAAAT |
| | | ATTCAGCCATGATAATTCCCAAGGTGTAAAAACGGCATTTGAAGAACAATT |
| | | GATGGAAATTTTGGCAGATATGAAGGAAATCATCCCTTTGTACAATAAGGTT |
| | | AGAAATTTCGCTACTAAAAAAGCATATTCAGTAGAAAAATTTAAACTTAATT |
| | | TTAATGTAGCGACATTGGCATCCGGTTGGGATCAGAACAAAGAAAATGCAA |
| | | ATTGTGCAATTATACTTCGAAAGAAGGATATGTATTATTTGGGTATATATAA |
| | | TTCTTCCAATCAGCCGTTTTTTGAAATAGTCGAGCAAGATGATGACGGGTTT |
| | | GAAAAGATGATATATAAACAATTTCCCGATTTTAATAAAATGTTACCTAAAT |
| | | GTACAGTATCACGTAAAAATGATGTTGCAGTTCATTTTAATAAGTCTGATGC |
| | | AGATTTTTTATTAAATGTAAATACGTTCAGTAAACCGCTTCTTATAACTAAA |
| | | GAAGTCTATGATTTAGGCACTAAAACTGTTCAAGGAAAAAAGAAATTCCAG |
| | | ATTGATTATAAGAGAAACACTGGGGATGAGGCCGGGTATAAGGCTGCCTTG |
| | | AAGGCATGGATTGACTTCGGGAAAGAGTTCATAAAGGCTTATGAAAGCACA |
| | | GCTATATACGATATATCATTGTTACGAAAAAGCGAAGATTATCCCGATATCC |
| | | AATCTTTTTACAAGGATGTAGACAATATATGCTATAAAATCGCCTTTCAAAA |
| | | GATCTCTGATGAAGCAGTAAATCAATGTGTAGAAAATGGTTCTTTATATCTT |
| | | TTTAAATTGCACGCCAAGGATTTTTCGCCCGGTGCCAGTGGGAAACCGAATT |
| | | TACACACGCTGTATTGGAAGTATGTATTTGAAGAAGAAAACTTGAAAGATG |
| | | TAGTTGTGAAATTAAACGGACAGGCAGAATTGTTTTATCGCCCCCGAAGTTT |
| | | AACGCAGCCAGTTGTACATAAAAAAGGAGAGAAAATTCTTAATAAAACTAC |
| | | TCGATCGGGAGAACCCGTTCCCGATGACGTATATGTTGAGTTGTCTCACTTT |
| | | ATTAAAAACGGAAGTACGGGCAATTTGTCGAATGAGGCAAAAAAGTGGCA |
| | | GGCGAAGGTAAGCGTTCGCAATGTGCCTCATGAGATTACAAAGGATCGCAG |
| | | ATTTACACAGGATAAATTCTTTTTCCATGTGCCTCTGACTTTGAATTATAAAT |
| | | CTGCCAATACACCCCGGCGCTTTAATGATTTAGTCAAAGCGTATATTAAGAA |
| | | GAATCCGGATGTGCATGTCATTGGAATTGACCGGGGCGAACGAAATCTTAT |
| | | TTATGCAGTTGTTATTGACGGAAAAGGTAAGATTGTTGAACAGCGGTCCTTC |
| | | AATATCGTAGGGGGCTATAATTACCAAGAAAAATTATGGCAAAAAGAAAAT |
| | | GAACGGCAGGCAGCGAGACGCGATTGGACCGCTGTCACCACGATTAAGGAT |
| | | TTAAAACAAGGATACCTGTCCGCTGTTGTACATGAGTTATCTAAAATGATAG |
| | | TGAAGTATAAGGCTATTGTTGTACTTGAAAACCTCAACGCGGGTTTTAAACG |
| | | TATGCGAGGCGGCATTGCGGAACGATCCGTTTACCAGCAGTTTGAAAAGGC |
| | | CTTAATCGATAAATTAAATTATTTAGTTTTTAAAGATGCAGTCCCTGCGGTG |
| | | CCCGGAGGAGTCTTAAATGCGTATCAATTAACCGACAAATTTGACAGTTTCA |
| | | GTAAAATGAACCAGCAAACGGGATTTTTGTTTTACGTGCCCGCAGCTTATAC |
| | | TTCTAAAATTGATCCCTTAACAGGATTTGTAGATTGTTTTAATTGGAAACAA |
| | | ATAAAGAAAAATACTGAGAGTCGGAAGGCATTTATTGGTTTGTTTGAATCG |
| | | CTTTGCTATGACGCGAATACGAATAATTTTGTGCTTCATTATAGGCATAAGG |
| | | CTAACCGATATGTTCGTGGCGGTAATTTGGACATTACGGAATGGGATATACT |
| | | GATTCAAGAAAATAAAGAAGTAGTAAGTAAAACCGGCAAATCCTATCGCCA |
| | | AGGGAAACGCATTATCTACAGGAAAGGCTCCGGTAATCATGGGGAAGCGTC |
| | | TCCCTACTATCCTCACGAAGAACTGCAATCTTTGTTGGAAGAACATGGAATT |
| | | TCATATAAAGCAGGCAAGAACATCTTACCCAAGATTAAAGCCGCTAATGAC |
| | | AACGCATTGGTAGAAAAGTTGCACTACATTATTAAGGCCGTGCTTCAATTAC |
| | | GCAACAGCAATAGTGAAACCGGAGAGGATTATATCAGTTCTCCCGTTGAAG |
| | | GCCGCAAAGATTGGTGCTTTGATAGTAGAGCTGCAGATGATGCGTTACCAC |
| | | AAGATGCTGATGCTAACGGTGCCTTTCATATTGCCATGAAAGGATTGTTATT |
| | | AATGAAACGGATTCGGAATGATGAAAAGCTTGCAATTAGTAATGAAGATTG |
| | | GCTGAATTACATACAAGGATTGAGAAGCTAA |
| 31 | 21 | ATGAGAGATGTGGTGACCTTCGAGAATTTTACAAAACAGTACCAGGTGAGC |
| | | AAGACTCTGAGGTTTGAACTGATCCCCCAGGGGAAAACACTGGATAACATG |
| | | AAAAGAGATGGAATCATTTCCGTGGACAGGCAGCGCAACGAGGACTATCAG |
| | | AAGGCCAAGGGCATCCTGGATAAGCTGTATAAATACATCCTGGACTTCACC |
| | | ATGGAGACCGTGGTGATCGACTGGGACGAGCTGGCAACCGCCACCGAGGAT |
| | | TTCAGGAAGAGCAAAGATAAGAAGGCCTACGAGAAGGTCCAGAGCAAGAT |
| | | CAGAACAGCTCTGCTGGAGCACGTGAAAAAACAGAAAGTGGGCACCGAGG |
| | | ATCTGTTCAAGGGGATGTTCAGCAGCAAGATCATTACCGGCGAAGTGCTGG |
| | | CAGCTTTCCCCGAGATCCGCCTGTCCGACGAAGAGAATCTGATTCTCGAAA |
| | | AGTTCAAGGACTTCACAACCTACTTCACAGGATTCTTCGAGAACCGGAAGA |
| | | ATGTGTTTACTGACGAGGCCCTGAGCACCAGCTTCACTTACCGGCTCGTGAA |
| | | CGATAATTTTATCAAGTTCTTCGATAACTGCATCGTGTTTAAGAACGTTGTG |
| | | AATATCAGCCCTCATATGGCCAAGAGCCTGGAGACCTGCGCCTCCGATCTG |
| | | GGCATCTTCCCTGGCGTTTCCCTGGAGGAGGTGTTCTCCATTAGTTTCTACA |
| | | ATAGACTGCTGACCCAGACTGGCATTGATCAGTTCAACCAGCTGCTGGGCG |
| | | GAATCTCTGTGAAGGAAGGAGAGCACAAGCAGCAGGGGCTGAATGAGATC |
| | | ATCAACCTTGCCATGCAGCAGAATCCTGAGGTCAAAGAGGTGCTGAAGAAT |
| | | AAGGCCCACCGGTTTACCCCCCTCTTTAAGCAGATTCTGTCCGACAGGTCCA |
| | | CCATGTCCTTTATTCCTGATGCCTTCGCCGATGACGGCGAAGTGCTGAGCGC |
| | | CGTCGACGCATACCGAAAATACCTGAGTGAGAAGAACATCGGCGATAGGGG |
| | | CTTTCAGCTGATCAGCGATATGGAAGCCTACAGCCCCGAGCTGATGAGAAT |
| | | CGGCGGCAAGTATGTGTCCGTGCTGTCACAGCTGCTGTTCAACTCTTGGAGC |
| | | GAGATCAGGGATGGAGTGAAGGCCTACAAGGAAAGCCTGATCACTGGCAA |
| | | GAAGACCAAGAAGGAACTGGAGAACATCGACAAGGAGATCAAATATGGAG |
| | | TGACACTCCAGGAGATCAAGGAGGCTCTGCCTAAGAAAGACATTTATGAGG |
| | | AGGTGAAGAAATACGCCATGTCCGTGGTGAAGGACTATCATGCAGGCCTGG |
| | | CCGAGCCTCTGCCAGAAAAAATTGAGACCGATGATGAGAGGGCTTCAATCA |
| | | AGCACATCATGGATAGCATGCTGGGGCTGTATAGATTTCTGGAGTACTTTAG |
| | | TCACGACAGCATCGAGGACACTGATCCTGTGTTCGGAGAGTGCCTGGACAC |
| | | TATCCTGGACGATATGAATGAGACAGTGCCTCTGTACAATAAGGTGCGCAA |
| | | TTTCAGCACAAGGAAGGTGTACAGCACAGAGAAGTTCAAGCTGAACTTCAA |
| | | TAATAGCTCCCTGGCCAACGGATGGGATAAAAACAAAGAGCAGGCTAATGG |
| | | CGCAATTCTGCTGAGAAAGGAGGGGGAGTATTTCCTGGGAATCTTCAACAG |
| | | CAAGAATAAACCCAAGCTCGTGTCCGACGGGGGCGCCGGCATCGGCTACGA |
| | | GAAGATGATTTACAAGCAGTTCCCTGACTTCAAGAAAATGCTGCCAAAGTG |
| | | CACCATCAGCCTGAAGGACACCAAAGCCCACTTCCAGAAATCTGATGAAGA |
| | | CTTTACCCTGCAGACCGATAAATTCGAGAAGTCCATCGTGATCACAAAGCA |
| | | GATCTACGACCTGGGGACCCAGACTGTGAACGGCAAGAAAAAGTTCCAGGT |
| | | GGATTACCCCAGGCTGACCGGAGATATGGAGGGATACCGGGCCGCACTGAA |
| | | AGAGTGGATCGATTTCGGCAAGGAGTTTATCCAGGCCTACACATCCACAGC |
| | | CATCTACGACACTTCCCTGTTCCGGGACTCATCAGATTACCCTGACCTGCCC |
| | | AGCTTTTACAAGGACGTTGACAACATCTGCTACAAGCTGACCTTTGAATGGA |
| | | TCCCGGACGCAGTGATTGACGATTGCATCGATGACGGGTCCCTGTACTTGTT |
| | | CAAGCTGCACAACAAAGACTTTTCCAGCGGCTCCATCGGCAAGCCAAATCT |
| | | TCACACACTCTATTGGAAAGCCCTGTTCGAGGAGGAAAACCTGTCCGATGT |
| | | GGTGGTGAAGCTGAATGGCCAGGCAGAGCTGTTTTATCGGCCAAAGAGCCT |
| | | GACAAGGCCTGTGGTGCACGAGGAGGGTGAGGTGATCATCAATAAGACTAC |
| | | CAGCACCGGCCTCCCTGTGCCAGATGACGTGTACGTCGAGCTGTCCAAGTTC |
| | | GTGCGCAACGGCAAGAAGGGAAACCTGACCGACAAAGCCAAGAACTGGCT |
| | | GGACAAAGTGACCGTGCGGAAAACCCCCCACGCCATCACCAAAGATCGGCG |
| | | CTTTACAGTGGACAAGTTCTTCTTCCACGTGCCCATTACACTGAACTATAAG |
| | | GCTGACTCAAGCCCTTATAGATTCAACGACTTCGTGCGCCAGTACATTAAGG |
| | | ACTGCTCAGATGTGAAGATTATCGGCATTGACAGGGGAGAGAGGAACCTGA |
| | | TTTACGCCGTGGTGATCGACGGCAAGGGCAACATCATCGAACAGAGAAGTT |
| | | TTAATACAGTGGGCACCTACAACTACCAGGAGAAACTGGAACAGAAGGAA |
| | | AAGGAGAGGCAGACCGCCAGGCAGGACTGGGCAACCGTGACAAAAATTAA |
| | | AGATCTGAAGAAGGGCTACCTGTCTGCCGTGGTGCACGAGCTGTCCAAGAT |
| | | GATCGTGAAGTACAAGGCTATCGTGGCCCTGGAGAACCTGAATGTGGGGTT |
| | | TAAACGGATGAGGGGGGGCATTGCCGAGAGGTCTGTGTATCAGCAGTTCGA |
| | | AAAGGCCCTGATCGACAAGCTTAATTACCTCGTGTTTAAGGACGAAGAACA |
| | | GAGTGGTTATGGTGGGGTCCTGAACGCCTACCAGCTGACCGATAAGTTCGA |
| | | GTCCTTCAGCAAAATGGGCCAGCAGACCGGGTTTCTTTTCTACGTGCCCGCA |
| | | GCCTACACCAGCAAAATCGACCCTCTCACAGGCTTCATTAACCCTTTCTCTT |
| | | GGAAACACGTGAAGAATCGGGAGGACAGGAGGAACTTCCTGAACCTGTTCA |
| | | GCAAGCTGTATTACGATGTGAACACCCACGACTTCGTGCTTGCCTACCACCA |
| | | CAGCAACAAAGATAGTAAATACACAATCAAGGGAAACTGGGAGATCGCCG |
| | | ACTGGGACATTCTGATACAGGAGAACAAGGAGGTGTTCGGCAAGACCGGCA |
| | | CACCTTACTGCGTGGGCAAAAGGATTGTGTACATGGATGATTCCACCACCG |
| | | GCCACAATAGAATGTGTGCTTACTATCCACATACCGAACTGAAAAAACTGC |
| | | TGTCCGAGTACGGAATTGAGTACACATCTGGACAGGATCTGTTGAAGATCA |
| | | TCCAGGAGTTCGATGACGACAAACTGGTGAAAGGCCTGTTCTACATCATTA |
| | | AGGCTGCTCTGCAGATGCGGAATTCCAACAGTGAGACAGGCGAAGACTACA |
| | | TCTCCTCCCCCATCGAGGGCAGGCCTGGCATCTGTTTTGACAGCAGAGCCGA |
| | | GGCCGACACACTGCCTTATGACGCAGACGCCAATGGCGCTTTTCACATTGCC |
| | | ATGAAGGGGCTGCTGCTGACCGAGCGGATCCGGAATGATGATAAGCTGGCC |
| | | ATCAGCAACGAGGAATGGCTGAACTATATCCAAGAGATGCGGGGCTAG |

### Group 3 Sequences (SEQ ID Nos: 32-44)

TABLE S3A
Enzyme Sequences Group 3

| SEQ | |
|---|---|
| ID | |
| NO | Sequence |
| 32 | MKNLKEFHNLYPVQKTLRFKLEPIGKTEEFIERAQILENDERRADEYLKVKEYIDRYHREFIE |
| | NALSQPLLKVESEGKQDSLEDFADCYNNDNSEKRSDNLEKIQDKLRTQIVKGFSKLPAFARI |
| | AKKELIKEDLPKFLKDKNEKEIVSHFDEFTTYFTGFHQNRMNMYTAEAKSTSIAFRLINQNL |
| | VKFVDNSNILEKVVPVLGKDIIAQLDKDFEPFLNVDSALDLFKIDNYNEVLTQLQIELYNAII |
| | GGRVDEGNKVEIKGLNQYINEFNQTHEKSLRIPKLKPLFKQILSENVGVSFRMEQFTDASQV |
| | QTAIKEEYIKLESSVFDKLKEMIKSLPTFNLNGIYLANDLGLTDICQRYYGAWDKLNNALVA |
| | EFDAVVPRKKTQSQEKRDNQVKKYLKSVKSISLGKIDSLLADVTEKSIVDYFTNLGAIDNET |
| | TQRENLFALIQNRYISLKEVLDCPTPSDELLRKNIEGIKDLLDAIKDLQRFIKPLCGCGEELDK |
| | DEMFYSDFSPLYETLDDIITPLYNKVRSYLTKKPYKLDKFKLNFETPTLLQSWPNYQAYSCA |
| | IFKEDDNHYYLAILDKNNRSCLNTIVPPISKNDIIGLVKHLQGGDMGKNVQNLMRIDGKTRK |
| | VNGRKETSGPNAGQNIRLEESKKTYLPHEINEIRIEKSFSLNSPNYRRECLNKYIDFYKPLVEE |
| | YYSEFDFEFKEASEYRDFSQFTNHINQQSYQLKIIPFSKKYLKTLVDNGQVFLFRILNKDFSP |
| | YSKGRPNLHTIYWKMLFDDNNLKDVIYKLNGKAEMFFRRSSITNPVIHAANKEIANKSAYN |
| | KQHKAVSKFDYDIIKDRRFTRNQYEFHVPITMNFKSAGSVRFNQEVLSFIKEKGIKHIIGIDR |
| | GERHLLYLTMINMKGEIVEQFSLNDVASNPNNPEYKQDYNELLSIKEGDRLSARRNWSTIEN |
| | IKELKSGYLSQIVHLLSKMMIENDAILVLENLNTGFMRGRQKVEKSVYLKFEKMLIDKLNY |
| | VVDKTAAPNEPSGALKALQLTDTYDNFNKYQKGNVRQCGFVFYIPAWNTSKTDPVTGYVN |
| | LFDTRLSTIGEIKSFFSKFDRIKYNSKNDAFEFTFDYNNFTTRAEGTRTCWTISSQGERIFTHR |
| | SKEQNNQFVSETVHPTQIFKDVFKMAGCEINGNLKEGIASIESLEPLKQLLHAFKLVIQMRNS |
| | ITGTEVDFLLSPAIDAKGTNFDSRKGISTLPENADANGAYNIARKGLMIVEQIQNADDIANIK |
| | YSVSNNDWLKFAQG |
| 33 | LCSIFAHMAINFAREIKKYYLCIINIKKILNMECLKDFYNQYSVQKTLRFKLEPVGKTEEFIER |
| | AQVLENDERRAAEYKKVKDLIDNYHRWFIEQALSAPLLKVDSTGDNDSLEDFQDCYNNDT |
| | SEKRSDNLEKIQGKLRSQIVKGFSKHPAFKHIDKKELITTDLKQFLTDPNEIDIVSHFANFTTY |
| | FTGFHQNRMNMYSVEAKSTSISFRLINQNLVKCVDNSKILEKVKPALGADIFSKLNHDFEPF |
| | LNVVDALDLFKVENYNEVITQPQIELYNAIIGGRVDNDSKVEIKGLNQYINEYNQTHSKQER |
| | LPKLKPLFKQILSEREGVSFRIEQFEKANQVQDAINEAYNDLHANVFTKLKDLLLNLSSFDL |
| | DGVFVANDQSLTDISQRHYGAWDTVKNAVVASYDMTNPRKKSQSQEKRDEQVKKHLKSI |
| | KSLSLATIDNMLKDSTGLSIVDYFTTLGAVNNENLQHENLFALIENRYNAARSVLDSDSPSD |
| | ELLRKNITQIKDLLDSIKDLQRFIKPLCGSGEEPLKDEIFYSDFSALYESLDDTITPLYNKVRSY |
| | LTRKPYSLDKFKLNFDNSQLLDGWDVNKEKDYLSILLRKNGYYYLAIANKNDKSALSQINQ |
| | CDMISGDCYEKLNYKLLPSPFKMLPKVFFSRKGIEVYNPSQEILDIYNEKKFQLGDKFDKESL |
| | IKLIDFYKNAIPQNESWQSFDFSFAPSQSYESINEFYSVIENQGYKIDFKKVPSSLINLLIDQGL |
| | LYVFKIANKDFSPHSKGRPNLHTIYWRMLFDENNLKNVVYKLNGRAEMFYRKSSIQNPVIH |
| | KAHHDIKNKSEYNKLHKPSSKFDYDIIKDRRFTRNQYEFHVPITMNFKPAGSGQFNRDVLKF |
| | IKAKGIKHIIGIDRGERHLLYLTMIDLKGRIVEQFSLNSVASNPNNPDFKQDYNTMLAIKEGD |
| | RLNARRNWSTIENIKELKQGYLSQIVHLLSKMMIENDAILVLENLNSGFMRGRQKVEKSVY |
| | LKFEKMLIDKLNYVVDKGTDLNEPCGALKALQLTDSYEKFNKFQKGNVRQCGFVFYIPAW |
| | NTSKIDPATGFVNLFDTRLSTIGEIKAFFSKFDRISYDASNDVFEFSFDYNNFTSRAQGTRTR |
| | WTVTTRGERIFTHRSKEKNNQFVSELVSPTSLLKDVLEKTGTNLQGNLKEAIASLQSLDELK |
| | QLLHAFKLTMQMRNSVTGTDVDYLISPAIDAKGNNFDSRECDSTMPLNADANGAFNIARK |
| | GLMIVEQIQKVDDIGNLKYAVTNKDWLTFAQK |

TABLE S3B
Human Codon Optimized Nucleotide Sequences Group 3

| SEQ | Corres- | |
|---|---|---|
| ID | ponding | |
| NO | AA | Sequence |
| 34 | 32 | ATGAAGAACCTCAAGGAGTTTCATAATCTCTATCCTGTGCAGAAGACTCTGCG |
| | | GTTTAAGCTGGAACCCATCGGTAAGACCGAAGAATTCATCGAGAGAGCACAG |
| | | ATTTTGGAGAATGATGAGCGGCGCGCCGACGAATATCTGAAGGTAAAGGAAT |
| | | ACATTGACCGGTACCATAGGGAATTCATTGAGAACGCCTTGTCACAGCCTCTG |
| | | CTCAAAGTCGAGAGTGAAGGCAAACAGGATTCCTTGGAAGACTTCGCAGACT |
| | | GTTATAACAACGACAATAGCGAGAAAAGATCCGATAATCTGGAGAAGATCCA |
| | | AGATAAACTGAGAACCCAGATCGTTAAAGGATTCAGCAAACTACCAGCCTTT |
| | | GCCCGGATCGCAAAGAAGGAGCTAATTAAGGAAGATCTGCCCAAATTCTTAA |
| | | AGGATAAAAACGAGAAGGAGATCGTGTCTCATTTTGACGAATTTACAACCTA |
| | | CTTTACCGGCTTTCATCAGAATAGGATGAACATGTATACTGCAGAGGCAAAGA |
| | | GTACATCCATAGCATTTCGCCTTATCAATCAGAACCTGGTGAAGTTTGTAGAC |
| | | AACTCTAATATTCTCGAAAAGGTTGTCCCAGTACTGGGAAAAGACATCATCGC |
| | | TCAACTGGACAAAGATTTCGAGCCTTTCCTCAACGTAGATTCTGCTCTGGACT |
| | | TATTCAAGATCGATAACTACAACGAGGTGCTCACTCAGCTTCAGATTGAGCTG |
| | | TATAATGCCATCATCGGGGGCAGAGTGGATGAAGGTAACAAAGTCGAGATAA |
| | | AGGGACTGAATCAGTATATTAACGAGTTCAACCAGACCCATGAGAAGAGTCT |
| | | GCGTATACCCAAACTCAAACCTCTGTTCAAGCAGATACTTAGCGAGAACGTG |
| | | GGCGTGTCGTTCCGCATGGAGCAGTTCACAGATGCCAGCCAAGTGCAGACTG |
| | | CTATCAAAGAGGAATACATCAAACTGGAATCCTCAGTTTTCGACAAACTCAAG |
| | | GAGATGATAAAATCACTCCCCACCTTCAACCTGAACGGGATCTACCTGGCTAA |
| | | TGATTTGGGTCTGACGGACATCTGCCAAAGATACTATGGCGCGTGGGATAAAC |
| | | TTAACAACGCCCTGGTTGCAGAATTCGACGCGGTGGTACCTAGGAAGAAAAC |
| | | CCAGAGTCAAGAGAAAAGGGACAACCAGGTCAAAAAATACCTGAAGAGCGT |
| | | GAAGTCCATCAGCTTGGGGAAAATAGACTCCCTTCTCGCTGACGTTACAGAAA |
| | | AGTCAATTGTGGACTATTTCACAAATCTCGGAGCTATCGATAACGAAACCACT |
| | | CAGCGCGAAAACCTGTTTGCTCTCATACAGAATCGCTACATCTCTCTCAAGGA |
| | | GGTCCTTGACTGTCCAACACCTTCTGATGAACTGCTTAGGAAGAATATTGAGG |
| | | GGATTAAGGACTTATTGGATGCAATAAAGGATCTACAACGGTTTATAAAACCC |
| | | CTATGTGGCTGCGGAGAGGAACTAGATAAGGATGAAATGTTTTACAGCGACT |
| | | TTTCACCTCTCTACGAGACTCTGGATGACATTATAACTCCCCTGTATAATAAG |
| | | GTGAGGAGCTACTTGACCAAGAAACCCTATAAGCTTGACAAGTTCAAGCTCA |
| | | ATTTTGAGACGCCCACCCTCTTGCAGTCTTGGCCTAACTATCAAGCCTACTCAT |
| | | GTGCGATCTTCAAGGAGGATGATAATCATTACTACTTAGCCATCCTGGACAAA |
| | | AACAACAGGTCGTGCCTGAATACCATCGTTCCACCTATATCCAAGAACGACAT |
| | | AATCGGCCTGGTCAAGCACTTACAGGGCGGCGATATGGGAAAAAATGTGCAG |
| | | AATTTGATGCGAATCGACGGTAAAACTCGGAAAGTTAATGGCCGGAAAGAGA |
| | | CATCTGGCCCAAATGCTGGCCAGAACATTAGGCTTGAGGAGTCGAAGAAGAC |
| | | ATATCTGCCGCACGAGATTAACGAGATCCGAATTGAGAAAAGTTTCAGCTTAA |
| | | ACTCTCCGAATTATAGACGCGAATGCCTGAACAAGTACATTGATTTCTACAAA |
| | | CCTCTGGTCGAGGAGTACTATTCAGAGTTTGACTTTGAGTTCAAAGAGGCTAG |
| | | CGAATATCGGGACTTCTCCCAGTTTACTAATCACATCAACCAGCAATCATACC |
| | | AGCTGAAAATTATCCCCTTCAGCAAAAAGTACCTGAAAACCCTAGTGGATAA |
| | | CGGGCAGGTGTTTTTATTCCGGATCCTCAACAAGGACTTTAGCCCATATTCTA |
| | | AGGGGCGTCCAAACCTGCACACGATCTACTGGAAGATGTTGTTTGACGACAAT |
| | | AACCTGAAGGACGTGATTTATAAGCTCAATGGTAAAGCGGAGATGTTTTTTAG |
| | | GCGGTCCTCTATTACAAACCCAGTGATACATGCTGCAAACAAAGAAATTGCC |
| | | AATAAGTCTGCCTACAATAAACAACATAAGGCCGTGTCCAAGTTCGATTATGA |
| | | CATTATAAAGGATCGCCGATTCACAAGAAACCAGTACGAGTTCCACGTCCCC |
| | | ATCACCATGAACTTTAAGTCCGCCGGATCAGTCAGGTTCAATCAAGAGGTTTT |
| | | GAGCTTCATTAAGGAGAAGGGTATTAAGCACATTATTGGAATTGATCGAGGT |
| | | GAACGGCACCTTCTTTATCTGACAATGATCAACATGAAAGGAGAGATCGTCG |
| | | AACAATTTTCTCTCAATGACGTTGCCTCAAATCCGAATAATCCCGAATACAAA |
| | | CAAGACTATAACGAGCTCCTCTCTATCAAGGAGGGAGATAGACTGTCGGCCC |
| | | GCAGGAATTGGTCCACAATCGAGAACATTAAAGAGCTAAAGTCTGGTTACCTT |
| | | AGCCAGATTGTTCACCTGCTTAGTAAGATGATGATCGAAAATGACGCCATTTT |
| | | AGTGCTAGAGAATCTGAACACGGGCTTTATGAGAGGTAGACAGAAGGTGGAA |
| | | AAAAGCGTCTATCTGAAGTTCGAGAAAATGCTTATCGATAAGCTGAATTATGT |
| | | GGTAGACAAAACAGCTGCACCAAACGAACCAAGTGGGGCATTAAAAGCTCTC |
| | | CAGCTCACTGACACGTACGATAACTTCAACAAGTACCAGAAGGGAAATGTGA |
| | | GGCAGTGCGGCTTTGTCTTTTATATCCCAGCCTGGAACACCTCTAAAACCGAC |
| | | CCCGTCACAGGGTATGTCAACTTGTTCGACACTCGTCTCAGTACCATCGGGGA |
| | | AATCAAGAGTTTTTTCAGCAAGTTCGATCGTATCAAATACAACAGTAAGAACG |
| | | ATGCCTTCGAGTTCACATTCGACTACAATAATTTCACTACGCGAGCGGAGGGG |
| | | ACTCGTACCTGCTGGACCATCTCCAGCCAGGGAGAAAGAATATTTACCCACCG |
| | | CTCAAAGGAACAGAACAATCAGTTCGTGTCCGAAACCGTGCACCCCACTCAG |
| | | ATCTTTAAAGACGTGTTCAAGATGGCTGGATGTGAAATCAATGGGAACCTGA |
| | | AAGAAGGGATCGCATCCATTGAATCCCTGGAGCCGTTGAAGCAGCTTCTGCA |
| | | CGCCTTTAAACTGGTGATTCAGATGCGCAATAGTATTACCGGAACTGAAGTGG |
| | | ACTTTCTGCTGAGCCCTGCAATTGACGCTAAAGGCACAAATTTTGATTCCCGA |
| | | AAAGGCATTAGCACATTGCCCGAAAATGCCGACGCCAACGGGGCTTACAATA |
| | | TAGCCAGAAAAGGCTTGATGATTGTAGAGCAGATTCAAAATGCGGATGATAT |
| | | CGCTAATATCAAGTACTCAGTTTCCAATAACGATTGGCTGAAGTTTGCCCAAG |
| | | GCTGA |
| 35 | 33 | CTTTGCAGCATTTTCGCCCACATGGCCATCAACTTCGCCAGAGAAATCAAGAA |
| | | GTACTACCTGTGCATCATCAACATAAAGAAGATCCTGAACATGGAATGCCTGA |
| | | AAGATTTCTATAATCAATACAGCGTCCAGAAGACCCTGAGATTCAAGCTGGA |
| | | ACCTGTTGGAAAGACCGAGGAATTCATCGAGAGAGCCCAAGTGCTGGAGAAC |
| | | GATGAACGCCGGGCCGCTGAATACAAGAAGGTCAAGGACTTGATCGATAACT |
| | | ACCACAGATGGTTCATCGAGCAGGCCCTGAGCGCTCCTTTGTTAAAGGTGGAC |
| | | AGCACCGGGGATAACGATTCCCTGGAAGATTTCCAGGACTGCTACAACAACG |
| | | ATACCAGCGAGAAGAGAAGCGACAATCTGGAGAAAATCCAGGGCAAGCTGC |
| | | GGTCTCAGATCGTGAAGGGCTTTAGCAAGCACCCCGCCTTCAAGCACATCGAC |
| | | AAAAAGGAGCTGATCACAACCGACCTGAAACAGTTTCTGACCGACCCCAACG |
| | | AGATCGACATCGTCAGCCACTTCGCCAACTTCACCACCTACTTCACCGGCTTC |
| | | CACCAGAACAGAATGAACATGTACAGCGTGGAAGCCAAGAGCACCTCCATCT |
| | | CTTTTAGACTGATCAACCAGAATCTGGTGAAGTGCGTGGATAATTCCAAGATC |
| | | CTGGAAAAAGTGAAGCCTGCTCTCGGCGCCGACATCTTCAGCAAGCTGAACC |
| | | ACGATTTTGAGCCTTTCCTGAATGTGGTGGACGCCCTGGACCTGTTCAAGGTG |
| | | GAAAACTACAATGAGGTGATCACACAACCTCAGATCGAACTGTACAACGCCA |
| | | TAATTGGAGGCAGAGTGGACAACGACTCGAAGGTGGAAATCAAAGGCCTGAA |
| | | CCAGTACATCAACGAGTACAACCAAACACACTCTAAACAGGAGCGGCTGCCT |
| | | AAGCTGAAACCACTGTTTAAGCAGATCCTGAGCGAGAGAGAGGGCGTGAGCT |
| | | TCAGAATCGAGCAATTTGAGAAAGCGAACCAGGTCCAGGACGCCATCAACGA |
| | | GGCCTACAATGACCTGCACGCCAACGTGTTCACAAAGCTGAAGGATCTGCTG |
| | | CTGAACCTGTCTAGCTTCGATCTGGACGGCGTGTTCGTGGCCAACGACCAGTC |
| | | TCTTACAGACATCAGCCAGCGGCATTACGGCGCCTGGGATACTGTGAAGAAC |
| | | GCTGTAGTGGCCAGCTACGACATGACAAATCCCAGAAAAAAAAGCCAGTCTC |
| | | AGGAGAAGAGAGATGAGCAAGTGAAGAAGCACCTGAAGTCTATCAAGTCACT |
| | | AAGCCTGGCCACCATCGACAATATGCTGAAGGATTCTACCGGCCTGAGCATC |
| | | GTGGATTATTTCACCACCCTGGGCGCGGTGAACAATGAAAATCTTCAGCACGA |
| | | GAACCTGTTCGCCCTGATCGAAAACCGGTACAACGCCGCCAGAAGCGTGCTG |
| | | GACAGCGACTCCCCAAGCGACGAACTGCTGAGAAAGAATATCACCCAGATCA |
| | | AAGACCTGCTCGACAGCATCAAGGACCTGCAGCGGTTCATCAAGCCCCTGTG |
| | | CGGAAGCGGCGAAGAGCCTCTGAAGGACGAGATTTTCTACAGCGATTTTTCTG |
| | | CCCTGTACGAAAGCCTCGATGACACCATCACCCCTCTGTATAACAAGGTGCGG |
| | | TCTTACCTGACCAGAAAGCCATACTCTCTGGACAAGTTCAAGCTGAACTTCGA |
| | | TAACAGCCAGCTGCTGGACGGCTGGGACGTTAACAAGGAAAAAGACTACCTG |
| | | AGCATCCTGCTGAGAAAGAACGGATACTACTACCTGGCTATTGCCAATAAGA |
| | | ACGACAAGAGCGCCCTGTCCCAGATCAACCAGTGTGATATGATCAGCGGCGA |
| | | CTGTTACGAGAAGCTGAATTACAAACTGCTGCCTAGCCCTTTCAAGATGCTGC |
| | | CTAAGGTGTTTTTCAGCAGAAAGGGCATCGAGGTTTACAACCCCAGCCAGGA |
| | | GATCCTGGACATCTACAACGAGAAAAAGTTTCAGCTGGGCGATAAATTCGAT |
| | | AAGGAATCTTTAATCAAGCTGATCGACTTCTACAAGAATGCCATCCCTCAGAA |
| | | CGAGTCCTGGCAGTCATTCGACTTCAGCTTTGCCCCTTCCCAATCCTACGAGA |
| | | GCATCAACGAATTCTACTCCGTGATAGAGAACCAGGGCTACAAAATCGACTTT |
| | | AAGAAGGTGCCCTCTTCTCTCATCAACCTGCTGATCGACCAGGGCCTGCTGTA |
| | | CGTGTTCAAGATCGCCAATAAGGACTTTTCTCCTCACAGCAAGGGTAGGCCTA |
| | | ATCTCCATACAATCTACTGGCGCATGCTTTTCGACGAGAACAACCTGAAGAAC |
| | | GTGGTGTATAAGCTGAACGGCAGAGCCGAGATGTTCTACAGAAAAAGCTCTA |
| | | TCCAGAACCCTGTGATCCACAAGGCTCACCACGACATCAAGAACAAATCTGA |
| | | ATATAACAAGCTGCACAAGCCAAGCAGCAAGTTTGATTACGACATTATCAAG |
| | | GACAGAAGGTTTACCAGAAATCAGTACGAGTTCCACGTGCCAATCACCATGA |
| | | ACTTCAAGCCTGCAGGCAGCGGCCAGTTCAACCGGGACGTGCTGAAATTCAT |
| | | CAAAGCCAAGGGAATTAAGCACATTATCGGAATCGATAGAGGCGAGAGGCAC |
| | | CTGCTGTATCTGACAATGATCGACCTGAAGGGCCGAATCGTGGAACAGTTCAG |
| | | TCTGAACAGTGTCGCCAGCAACCCCAACAACCCTGACTTCAAGCAGGATTAC |
| | | AACACAATGCTGGCCATCAAAGAGGGCGACCGCCTGAACGCCCGGAGAAACT |
| | | GGAGCACCATCGAGAACATCAAGGAACTGAAGCAGGGCTATCTGAGCCAGAT |
| | | CGTGCACCTCCTGAGCAAGATGATGATCGAGAATGACGCCATACTGGTACTG |
| | | GAAAACCTGAACAGCGGATTCATGAGAGGCAGACAGAAGGTGGAGAAGAGC |
| | | GTGTACTTGAAATTCGAGAAGATGCTGATTGACAAGCTGAACTACGTGGTGG |
| | | ACAAGGGCACGGATCTGAACGAGCCTTGCGGCGCCCTGAAAGCTCTGCAGCT |
| | | GACAGACAGCTACGAGAAGTTCAACAAATTCCAGAAGGGAAATGTGCGGCAG |
| | | TGCGGCTTCGTGTTCTACATCCCCGCCTGGAACACCTCCAAGATCGACCCTGC |
| | | TACCGGCTTCGTGAACCTGTTTGATACCAGACTGTCCACAATCGGCGAGATCA |
| | | AGGCCTTCTTCAGCAAGTTCGACCGGATCTCTTACGACGCCAGCAACGACGTG |
| | | TTCGAGTTCAGCTTTGATTACAACAACTTCACCAGCAGAGCCCAGGGCACACG |
| | | GACCAGATGGACCGTGACCACACGGGGCGAGAGAATCTTTACCCACAGATCC |
| | | AAAGAGAAGAACAACCAGTTCGTGAGCGAGCTGGTGAGCCCCACATCTCTGC |
| | | TGAAAGACGTGCTGGAAAAGACAGGAACAAACCTCCAGGGCAATCTGAAGG |
| | | AAGCCATCGCCAGCCTGCAGAGCCTGGATGAGCTGAAGCAACTGCTTCATGC |
| | | CTTCAAGCTGACAATGCAGATGCGGAATTCCGTGACCGGCACCGACGTGGAC |
| | | TACCTCATTAGCCCAGCCATCGACGCTAAAGGAAACAACTTCGATAGCCGGG |
| | | AATGTGACTCTACCATGCCTCTGAATGCTGACGCCAACGGCGCCTTCAATATC |
| | | GCTAGAAAGGGCCTGATGATCGTGGAACAAATCCAGAAAGTGGATGACATCG |
| | | GCAACCTGAAGTACGCCGTAACAAACAAAGATTGGCTGACCTTCGCCCAGAA |
| | | G |

TABLE S3C
Direct Repeat Group 3

| SEQ ID | Direct Repeat | SEQ ID | Direct Repeat |
|---|---|---|---|
| NO | (Variant #1) | NO | (Variant #2) |
| 36 | ATCTACAATAGTAGAAAT | 37 | ATCTACAATAGTAGAAAT |
| | TTTGGTCTATAGTTAGAC | | TTTGGTCTATAGTTAGAC |
| 38 | GTCTATACTAAGACCAAA | 39 | GTCTATACTAAGACCAAA |
| | ATTTCTACTATTGTAGAT | | ATTTCTACTATTGTAGAT |

TABLE S3D
crRNA Sequences Group 3

| SEQ | | |
|---|---|---|
| ID NO | Sequence | FIG. |
| 40 | GUCUAACUAUAGACCAAAAUUUCUACUAUUGUAGAU | FIG. 3A |
| 41 | GUCUAUACUAAGACCAAAAUUUCUACUAUUGUAGAU | FIG. 3B |

TABLE S3E
Consensus Sequence Group 3

| SEQ | |
|---|---|
| ID | |
| NO | Consensus Sequence of AA SEQ ID Nos: 32-33) |
| 42 | LCSIFAHMAINFAREIKKYYLCIINIKKILNMXXLKXFXNXYXVQKTLRFKLEPXGKTEEF |
| | IERAQXLENDERRAXEYXKVKXXIDXYHRXFIEXALSXPLLKVXSXGXXDSLEDFXDCYN |
| | NDXSEKRSDNLEKIQXKLRXQIVKGFSKXPAFXXIXKKELIXXDLXXFLXDXNEXXIVSHF |
| | XXFTTYFTGFHQNRMNMYXXEAKSTSIXFRLINQNLVKXVDNSXILEKVXPXLGXDIXXX |
| | LBXDFEPFLNVXXALDLFKXXNYNEVJTQXQIELYNAIIGGRVDXXXKVEIKGLNQYINEX |
| | NQTHXKXXRJPKLKPLFKQILSEXXGVSFRXEQFXXAXQVQXAIXEXYXXLXXXVFXKLK |
| | XXJXXLXXFBLBGXXXANDXXLTDIXQRXYGAWDXXXNAXVAXXDXXXPRKKXQSQE |
| | KRDXQVKKXLKSXKSJSLXXIDXXLXDXTXXSIVDYFTXLGAXBNEXXQXENLFALIZNR |
| | YXXXXXVLDXXXPSDELLRKNIXXIKDLLDXIKDLQRFIKPLCGXGEEXXKDEXFYSDFSX |
| | LYEXLDDXITPLYNKVRSYLTXKPYXLDKFKLNFXXXXLLXXWXXNXZXXXXXIXXXXB |
| | XXYYLAIXBKNBXSXLXXXXIXXXDXIXXXXXXXXGDXXXXXXNXXXJXXXXXXX |
| | XXXXXXXXXXYXPXXEIXXIXXEKXFXLXXXXXXXEXLXKXIDFY |
| | KXXXXXXEXXXXFDFXFXXXXYXXXXZFXXXIXXQXYXJXXXXXXXJXXLXDXG |
| | XXXXFXIXNKDFSPXSKGRPNLHTIYWXMLFDXNNLKBVXYKLNGXAEMFXRXSSIXNP |
| | VIHXAXXXIXNKSXYNKXHKXXSKFDYDIIKDRRFTRNQYEFHVPITMNFKXAGSXXFNX |
| | XVLXFIKXKGIKHIIGIDRGERHLLYLTMIBXKGXIVEQFSLNXVASNPNNPXXKQDYNXX |
| | LXIKEGDRLXARRNWSTIENIKELKXGYLSQIVHLLSKMMIENDAILVLENLNXGFMRGR |
| | QKVEKSVYLKFEKMLIDKLNYVVDKXXXXNEPXGALKALQLTDXYXXFNKXQKGNVR |
| | QCGFVFYIPAWNTSKXDPXTGXVNLFDTRLSTIGEIKXFFSKFDRIXYBXXNDXFEFXFDY |
| | NNFTXRAZGTRTXWTXXXXGERIFTHRSKEXNNQFVSEXVXPTXJXKDVXXXXGXXJXG |
| | NLKEXIASJZSLXXLKQLLHAFKLXXQMRNSXTGTXVDXLJSPAIDAKGXNFDSRXXXST |
| | XPXNADANGAXNIARKGLMIVEQIQXXDDIXNJKYXVXNXDWLXFAQX |

TABLE S3F
Native Nucleotide Sequences Group 3

| | Corres- | |
|---|---|---|
| SEQ | ponding | |
| ID NO | AA | Sequence |
| 43 | 32 | ATGAAGAATTTAAAGGAATTTCACAACCTGTATCCAGTACAGAAAACTCTT |
| | | CGTTTTAAGTTGGAGCCTATCGGAAAAACAGAGGAGTTCATTGAACGTGCA |
| | | CAAATCTTAGAGAATGATGAGCGCCGCGCTGATGAATATCTCAAGGTTAAG |
| | | GAGTATATAGACCGATATCATCGTGAGTTCATTGAGAACGCTTTAAGTCAA |
| | | CCTCTACTTAAGGTGGAATCGGAAGGGAAGCAGGATTCTCTTGAAGATTTT |
| | | GCCGACTGCTACAACAATGACAATAGCGAAAAACGCAGTGATAATCTTGA |
| | | AAAAATTCAAGACAAACTTAGAACGCAAATTGTCAAAGGATTCAGTAAAT |
| | | TACCCGCTTTTGCACGAATAGCTAAAAAGGAGCTTATTAAGGAGGATTTAC |
| | | CCAAGTTTCTAAAAGACAAAAACGAAAAAGAAATTGTTTCGCATTTTGATG |
| | | AGTTCACAACCTATTTCACTGGTTTCCATCAGAATCGCATGAACATGTATA |
| | | CTGCCGAAGCAAAGTCGACTTCTATAGCTTTTAGGCTTATTAACCAGAACC |
| | | TTGTAAAATTTGTTGACAATAGCAATATCCTTGAAAAGGTTGTTCCTGTACT |
| | | TGGAAAAGACATTATTGCACAACTTGATAAAGATTTTGAACCGTTCCTCAA |
| | | CGTTGATTCTGCTCTTGATTTGTTTAAAATTGACAATTACAATGAAGTGCTT |
| | | ACACAATTGCAAATTGAGCTATACAACGCGATTATAGGTGGAAGAGTGGA |
| | | TGAGGGGAACAAAGTTGAGATTAAAGGATTGAACCAGTATATCAACGAGT |
| | | TTAATCAAACGCACGAAAAGTCACTAAGGATTCCAAAACTCAAACCATTGT |
| | | TTAAACAAATATTGAGTGAAAATGTGGGTGTTTCATTTAGAATGGAGCAAT |
| | | TCACCGATGCCAGCCAAGTACAAACCGCCATAAAAGAAGAATACATCAAG |
| | | TTGGAGTCTAGTGTTTTTGACAAGCTAAAAGAAATGATTAAGAGTTTGCCA |
| | | ACATTCAACTTAAATGGTATTTATCTAGCCAATGATTTGGGGCTTACCGAC |
| | | ATATGCCAACGTTATTATGGTGCTTGGGACAAATTGAATAATGCCCTTGTC |
| | | GCTGAATTTGACGCTGTTGTGCCTCGCAAGAAAACACAGTCACAGGAAAA |
| | | ACGTGACAACCAAGTGAAGAAGTACCTTAAAAGTGTCAAGAGCATATCTTT |
| | | AGGCAAAATCGACAGCCTCTTGGCTGACGTAACAGAGAAGTCAATTGTTG |
| | | ACTATTTCACCAACCTGGGTGCTATCGACAATGAAACCACGCAGCGTGAGA |
| | | ACTTGTTTGCACTCATTCAAAACCGATATATTTCTTTAAAGGAAGTTCTTGA |
| | | TTGCCCTACACCGTCCGACGAACTCTTGCGCAAGAATATTGAAGGCATCAA |
| | | GGATTTACTTGATGCTATCAAAGACTTACAACGATTTATCAAACCGCTGTG |
| | | CGGTTGCGGTGAGGAACTTGATAAAGATGAGATGTTCTATAGCGATTTTTC |
| | | TCCTCTTTATGAAACGCTTGACGACATCATTACTCCTCTATACAACAAGGTG |
| | | AGAAGCTATCTGACAAAGAAGCCTTACAAACTTGACAAGTTCAAGCTGAA |
| | | TTTCGAAACTCCGACTTTATTGCAAAGTTGGCCAAATTATCAAGCATATTCT |
| | | TGTGCTATTTTTAAAGAAGATGATAATCACTATTATCTAGCAATTCTTGATA |
| | | AGAATAATCGAAGCTGTCTTAATACTATAGTACCACCAATATCAAAAAACG |
| | | ATATCATTGGATTAGTTAAGCACTTACAAGGTGGTGACATGGGAAAGAAC |
| | | GTTCAGAACTTAATGAGAATAGATGGCAAAACAAGAAAAGTCAATGGTCG |
| | | TAAAGAGACTTCTGGCCCAAATGCAGGACAAAACATACGTCTTGAGGAAT |
| | | CAAAAAAGACATATTTGCCACATGAAATTAATGAAATAAGAATTGAAAAA |
| | | TCTTTTTCATTAAATAGCCCAAATTATAGGAGAGAATGCCTCAACAAGTAT |
| | | ATTGACTTTTATAAACCACTTGTAGAAGAGTATTATTCTGAATTTGATTTTG |
| | | AATTCAAAGAAGCATCTGAATATAGAGATTTCTCTCAGTTTACCAATCACA |
| | | TTAATCAGCAGTCTTACCAATTAAAGATTATTCCTTTTTCGAAAAAGTATCT |
| | | AAAAACTCTTGTTGATAATGGTCAAGTATTTCTTTTTAGAATACTAAACAA |
| | | AGACTTCTCTCCTTATTCTAAAGGACGTCCTAATTTGCACACGATTTACTGG |
| | | AAGATGCTCTTTGATGACAACAACCTCAAGGATGTAATCTACAAGCTTAAC |
| | | GGCAAAGCCGAGATGTTTTTCCGCAGGAGCTCTATCACGAATCCAGTAATC |
| | | CATGCTGCCAACAAGGAGATTGCCAACAAGAGCGCTTATAACAAGCAGCA |
| | | CAAAGCGGTGAGCAAGTTTGATTATGATATAATCAAGGATCGTCGCTTCAC |
| | | TCGCAACCAATATGAGTTCCATGTTCCAATAACCATGAACTTCAAATCGGC |
| | | AGGAAGTGTTCGTTTCAATCAAGAAGTGTTGTCTTTCATCAAAGAGAAAGG |
| | | CATCAAGCATATTATTGGGATTGATAGAGGCGAGCGTCATCTTCTTTACTT |
| | | AACGATGATTAACATGAAAGGAGAGATTGTGGAGCAGTTCTCGCTTAATG |
| | | ACGTGGCAAGCAATCCTAATAATCCTGAATATAAGCAAGATTACAATGAGT |
| | | TGCTTTCAATCAAGGAAGGCGACCGACTGAGCGCGCGTCGTAACTGGTCAA |
| | | CTATCGAGAACATCAAGGAGCTGAAATCAGGATATCTAAGCCAGATTGTTC |
| | | ATCTCTTGTCAAAGATGATGATAGAGAATGATGCCATCTTGGTTCTTGAGA |
| | | ACCTTAATACAGGATTCATGAGAGGACGTCAAAAGGTTGAAAAATCGGTA |
| | | TATCTCAAATTTGAGAAAATGCTTATTGACAAGCTCAATTATGTGGTAGAC |
| | | AAAACAGCTGCCCCTAATGAGCCTAGTGGAGCATTGAAAGCATTGCAACTT |
| | | ACCGACACTTACGACAACTTCAACAAGTATCAAAAGGGCAATGTGCGCCA |
| | | GTGCGGTTTTGTTTTCTACATTCCAGCATGGAACACCAGCAAGACCGACCC |
| | | TGTTACTGGCTACGTAAACCTATTTGACACACGACTGTCAACAATTGGTGA |
| | | GATTAAGTCTTTCTTCAGCAAATTTGACCGCATCAAGTATAATTCTAAAAA |
| | | TGACGCTTTTGAATTCACTTTCGATTACAACAACTTTACTACAAGAGCAGA |
| | | AGGCACTCGCACTTGCTGGACTATAAGCTCACAAGGAGAGCGCATTTTTAC |
| | | TCATCGCAGCAAAGAGCAGAACAATCAGTTTGTCTCTGAAACAGTTCACCC |
| | | AACACAAATCTTTAAGGATGTGTTCAAAATGGCTGGTTGTGAGATTAACGG |
| | | CAATCTGAAAGAAGGAATTGCTTCAATCGAAAGTCTAGAACCTTTAAAGCA |
| | | GCTATTGCATGCTTTTAAGCTTGTGATTCAAATGAGAAACAGCATTACTGG |
| | | AACCGAAGTTGACTTCTTGCTATCTCCTGCTATAGATGCTAAAGGCACGAA |
| | | CTTCGATTCTCGAAAAGGCATTAGTACTTTGCCCGAAAATGCCGATGCTAA |
| | | TGGCGCTTATAACATAGCTCGAAAAGGCTTGATGATTGTTGAGCAAATCCA |
| | | AAATGCCGATGATATTGCTAATATTAAATATTCAGTAAGCAACAATGACTG |
| | | GCTCAAGTTTGCGCAAGGATAA |
| 44 | 33 | CTGTGCTCGATTTTTGCACACATGGCCATTAATTTTGCGCGTGAGATAAAA |
| | | AAGTATTATCTTTGTATCATAAACATCAAAAAAATATTGAACATGGAATGC |
| | | TTAAAAGATTTTTACAACCAGTATTCAGTCCAAAAGACTCTAAGGTTCAAG |
| | | CTGGAACCTGTTGGAAAGACCGAGGAATTCATTGAACGAGCGCAGGTCTT |
| | | AGAGAATGATGAACGTCGAGCAGCCGAATACAAGAAAGTTAAGGACCTTA |
| | | TCGACAACTACCACCGTTGGTTTATTGAGCAAGCACTTAGTGCCCCTTTATT |
| | | GAAGGTAGACAGCACTGGCGACAACGATTCTTTGGAGGATTTTCAAGATTG |
| | | TTACAACAACGACACGAGTGAGAAACGCAGTGATAATCTTGAGAAAATTC |
| | | AAGGTAAATTGAGGAGCCAAATCGTCAAGGGATTTAGTAAGCATCCAGCC |
| | | TTTAAACACATCGACAAGAAGGAACTCATCACTACCGATTTAAAACAATTC |
| | | CTCACCGACCCTAACGAGATTGATATTGTTTCACATTTTGCCAATTTCACTA |
| | | CCTATTTCACTGGATTTCATCAAAACCGAATGAACATGTATTCGGTCGAGG |
| | | CTAAATCAACCTCAATTTCATTTAGGCTGATTAACCAAAATCTTGTGAAAT |
| | | GCGTTGACAACAGCAAGATTCTTGAAAAAGTCAAACCAGCATTAGGTGCT |
| | | GATATCTTCTCGAAACTCAATCACGATTTTGAGCCATTCCTTAATGTAGTTG |
| | | ATGCTCTTGACTTGTTCAAGGTAGAGAACTACAATGAAGTCATAACACAAC |
| | | CCCAAATTGAACTCTACAACGCCATCATTGGCGGACGTGTTGACAATGACA |
| | | GCAAGGTTGAGATTAAAGGACTTAATCAGTATATAAATGAGTATAATCAA |
| | | ACCCATTCCAAGCAAGAGCGTTTGCCAAAACTCAAACCCCTTTTCAAGCAA |
| | | ATCCTGAGCGAGCGTGAGGGCGTTTCATTTAGAATAGAACAGTTTGAAAAA |
| | | GCCAACCAAGTCCAAGATGCAATTAATGAAGCCTACAATGATCTCCATGCT |
| | | AATGTCTTTACAAAACTCAAGGACCTTCTCCTGAATTTAAGCAGTTTTGACC |
| | | TTGATGGAGTGTTTGTTGCCAACGATCAGTCTTTAACCGACATTTCGCAGC |
| | | GGCATTATGGTGCATGGGATACAGTCAAGAATGCTGTGGTAGCCTCTTACG |
| | | ACATGACCAACCCGCGCAAGAAATCTCAGTCGCAAGAAAAGCGCGACGAG |
| | | CAAGTCAAGAAGCATCTCAAGAGCATTAAGAGTCTTTCTTTGGCCACAATC |
| | | GACAATATGCTTAAAGATAGCACTGGACTGTCAATTGTAGATTATTTCACA |
| | | ACACTGGGGGCTGTCAACAATGAGAACTTGCAACACGAGAATCTATTTGCA |
| | | CTTATTGAGAACCGTTACAATGCAGCTAGGTCTGTTCTTGACAGTGATTCG |
| | | CCAAGCGATGAATTGTTGCGAAAGAACATAACCCAAATTAAAGATTTGCTT |
| | | GATTCCATCAAGGACTTGCAGCGATTTATCAAACCTTTGTGCGGTAGTGGT |
| | | GAAGAGCCATTGAAAGACGAGATATTCTATAGCGATTTCTCGGCACTTTAC |
| | | GAATCGCTCGATGACACAATAACCCCTCTTTATAATAAGGTAAGGAGTTAC |
| | | TTGACAAGGAAACCTTATTCTCTCGACAAGTTTAAACTGAATTTCGACAAC |
| | | TCTCAATTGCTGGATGGCTGGGATGTAAATAAGGAAAAAGACTATCTGTCA |
| | | ATCCTATTGCGCAAGAATGGCTACTATTATTTAGCCATCGCCAACAAGAAC |
| | | GACAAGAGCGCTTTGTCGCAGATTAATCAATGCGATATGATTAGCGGTGAT |
| | | TGTTACGAGAAGCTTAACTACAAGCTATTGCCATCTCCCTTCAAAATGCTA |
| | | CCTAAAGTGTTCTTCTCTCGTAAGGGTATTGAAGTCTATAATCCGTCGCAA |
| | | GAGATACTAGACATCTACAATGAGAAAAAGTTTCAACTGGGTGACAAGTTT |
| | | GACAAGGAGTCACTTATCAAGCTTATTGATTTCTACAAGAATGCAATACCT |
| | | CAGAATGAAAGCTGGCAATCATTTGATTTCTCTTTTGCACCATCACAGTCTT |
| | | ATGAGTCAATAAATGAGTTTTATAGCGTGATTGAAAACCAGGGCTATAAAA |
| | | TCGATTTCAAGAAAGTGCCTTCAAGCTTAATCAACTTGCTTATTGATCAAG |
| | | GGCTTCTCTATGTCTTCAAGATTGCCAATAAGGACTTCTCGCCCCATTCTAA |
| | | GGGTAGACCCAACCTTCACACCATCTATTGGAGAATGCTCTTTGACGAGAA |
| | | CAATCTTAAGAATGTAGTTTACAAGTTGAATGGTAGAGCCGAGATGTTTTA |
| | | CCGTAAAAGCTCTATTCAGAACCCTGTCATCCACAAGGCTCACCACGATAT |
| | | AAAAAACAAGAGTGAGTACAACAAGCTTCACAAGCCTTCAAGCAAGTTTG |
| | | ACTACGATATCATCAAAGACCGCCGTTTCACCCGTAACCAATATGAGTTCC |
| | | ATGTGCCCATCACTATGAATTTCAAACCAGCAGGTAGTGGGCAGTTCAATC |
| | | GTGACGTGCTCAAATTCATTAAGGCTAAAGGCATCAAGCACATCATTGGCA |
| | | TCGACCGCGGTGAGCGTCATCTGCTTTATCTCACCATGATTGACTTGAAAG |
| | | GTCGCATTGTTGAGCAGTTCTCGCTTAATAGTGTTGCCAGCAACCCTAATA |
| | | ATCCCGACTTCAAGCAGGATTATAACACAATGCTTGCTATCAAAGAGGGCG |
| | | ACCGCCTCAACGCACGTCGCAACTGGTCTACTATCGAGAATATCAAAGAGC |
| | | TCAAGCAAGGCTATCTAAGTCAAATAGTTCATCTGCTCTCGAAAATGATGA |
| | | TTGAAAATGATGCTATTCTCGTGCTTGAGAACCTCAACTCGGGATTTATGC |
| | | GTGGTAGGCAAAAAGTAGAAAAATCGGTCTATCTCAAGTTTGAGAAAATG |
| | | CTTATAGACAAGCTCAACTATGTTGTTGACAAGGGCACTGACCTCAATGAA |
| | | CCATGCGGCGCTCTAAAAGCCCTGCAGCTTACCGATAGTTATGAAAAATTC |
| | | AATAAGTTTCAAAAAGGCAATGTGCGCCAATGCGGTTTCGTGTTCTACATA |
| | | CCAGCCTGGAACACAAGCAAGATTGACCCGGCAACAGGTTTTGTCAATCTC |
| | | TTTGACACTCGTCTATCAACAATTGGGGAAATCAAAGCTTTCTTCAGCAAA |
| | | TTTGACCGCATCTCTTATGATGCTTCCAATGATGTCTTTGAGTTCAGTTTTG |
| | | ATTACAACAATTTCACGTCAAGGGCTCAAGGTACTCGCACGCGATGGACTG |
| | | TTACCACCCGAGGTGAACGCATCTTTACTCATCGAAGCAAGGAGAAGAAC |
| | | AATCAGTTTGTTTCTGAATTAGTTTCGCCAACCAGCCTGCTCAAGGACGTTT |
| | | TGGAAAAGACTGGCACCAACTTGCAGGGAAATCTCAAAGAGGCAATAGCT |
| | | TCATTGCAAAGCCTTGACGAACTCAAGCAATTGCTTCATGCTTTCAAGCTC |
| | | ACTATGCAAATGCGAAACAGCGTCACTGGAACCGATGTTGACTATTTGATT |
| | | TCACCAGCTATAGATGCTAAGGGTAACAACTTCGATTCTCGTGAGTGTGAC |
| | | TCCACCATGCCTCTAAATGCCGACGCCAATGGGGCTTTCAACATTGCTCGG |
| | | AAAGGACTTATGATTGTTGAGCAAATCCAGAAGGTAGACGATATTGGCAA |
| | | TTTAAAATATGCTGTCACCAACAAGGACTGGCTAACTTTTGCTCAAAAATG |
| | | A |

### Group 4 Sequences (SEQ ID Nos: 45-56)

TABLE S4A
Enzyme Sequences Group 4

| SEQ | |
|---|---|
| ID | |
| NO | Sequence |
| 45 | MSNLYRNLHNFYSVQKTLRFELIPQGKTKENMEKEGILKADEHRAEIYSKVKKYCDEYHK |
| | LFIDKCLKNIRLNELNKYYELYSVVKKDEKQKEEFIKIQEKLRKQISESFRNNNEYKGLFQK |
| | DIINIYLITMYKDDKEKIKDISEFNKFTTYFSGYNKNRENMYSEEEKPTGIAYRLINENLPTFI |
| | ENFKIYNKVIKFMPEIINKIHTDLMEYIQVEDIDEIFDINYYNEVLTQKGIECYNIIISGKSKSN |
| | GEKIKGLNEYINEFNQKHNEKIPKLQELYKQILSDTDTASFKFDTIESDEELLNNIESYYTKL |
| | LPVFNKINQLFAKFNKYNLDLIFINNDGTLNTISNEIYKDWSYIRNRIGERYDIEYTGKLKKD |
| | TEQYSKQKQEYMKKQKQYSLKFLNDSLRDNYLIEYISNYIEQSKIMEKMKTDFTEVQKIES |
| | RGDTKQLIKDENSIVKIKNLLDDIKFLQEFAKILVLKDRTIEKDAEFYSELMPYYNELKDIIP |
| | LYNKTRNYLTQKPYSTEKIKLNFECPTLLNGWDLNKEEANLGVILLKNEKYYLGIINPYCK |
| | KIFKIQEKDSNSENNYKKMEYKLLPGPNKMLPKVFFSKSKIDEFMPSDELLEKYNKGCHKK |
| | GKDFDINFCHELIDFYKTSLNKHKDWKKFDFKFKSTSEYNDISEFYKDVEEQGYKIEYSEYS |
| | EKYINELVDRGELYLFQIYNKDFSEYSKGRPNLHTMYWKAVFDIENIKNPVYKLNGEAEIF |
| | YRKKSLERKITHSANEPVANKNENTIKSGKPTSLFKYDLIKDKRYTVDKFQFHVPITMNFKS |
| | EKMFNINQVVNKYLKYNDDINVIGIDRGERNLLYVCVIDKNEKIVYQKSLNEIVNEYKSIK |
| | YSTNYHTLLNKKEKEREIAREDWKNIENIKELKEGYMSQVIHIL VELMRKYNAIIVIEDLNK |
| | GFKNSRIKVEKQVYQKFEKMFIDKLNYLVFKDEPKESEGGVLNAYQLTNKFETFNKIGKQS |
| | GVLYYIPAWCTSKIDPTTGFINRFYIKYENLDKSKEFINKIDDISYNSSEKLFEFDIDYSKFTD |
| | RLNETRNKWTLYTNGERIYTYRNDKGEWIDKKIQLTNEFNKLFEKYSINLDNIKNEILEKA |
| | NIEFFKGNNETLGFIQLFKLMVQMRNSLTGKEEDNLISPVKNSNGKFFNTNEQIEGLPKDAD |
| | ANGAYNIARKGLMLIEQMRNTEDDKLNKIKYNITEKEWLDYVQNRGM |
| 46 | MLYDNIIVNEIYGRYDMSNLYNSLHNFYPVQKTLKFELIPQGKTKENMEREGILKTDQHRA |
| | AVYKKVKKYCDEYHKVFIDRCLKDLQLKELERYYELYSLTNKDDEKKEELKKIQEKLRK |
| | QISDSFKNNSEFKGLFQKDIINSYLMAMYKEDEEKIKEISEFNKFTTYFSGYNKNRENMYSEEE |
| | KSSAISYRIINENLPTFIDNLRIYNKIIKLIPEIMEKIYTDLIEYIQVENINKVFNINHYNKVL |
| | TQRGIECYNIIISGKVQNEGEKIKGINEYINEFNQTHNEKIPKMQELYKQILSDTDTASFKYD |
| | VIECDRDLLDNIESYGRRILQILDGTGSLLEKINDYNLDLIFINNDGILSKVSNDIYSDWSYIR |
| | NRISDIYDEKYNGKLSKNTEKYFKQKQDYIKKQKCYSLKFLKQSLEDDRVIKYISSYIRETS |
| | LVERIRSSFIEVQNIKERSNEKNLIKDENSITKIKTLLDNIKLLQEFVKMLIPKDRTEEKEAKF |
| | YSELMTYYDELENVIPLYNKTRNYLTQKPYSTQKIKLNFECPTLLNGWDSNKEQANLGVIL |
| | LKDEKYYLGIINPYCRKIFETEEQDINSENNYKKMEYKQLPGSKMLAKVFFSKSRKDEFNP |
| | SDELLKKYEKGLHKKGPNFDIQFCRELIDFYKNSLNKHEEWKKFDFKFRDTLEYNNIGEFY |
| | KEFEEQGYKIEYSEYSESYINELVNRGELYLFQIYNKDFSEYSKGNPNLHTMYWKAVFDLQ |
| | NIKDPIYKLNGNAEIFYRQRSLEKRITHPANTPVNNKSEETIKAGKPQSIFKYDLIKDKRYTM |
| | DKFQFNVPITMNFKSEKLLNINGIVNKYLKYNDDIYVIGIDRGERNLLYVCVIDKNEKIVYQ |
| | KSLNEIVNEYRNIKYSIDYHLLLDKKEKEREAAREDWKNIENIKELKEGYMSQVIHVLIEL |
| | MRKYNAIIVIEDLNKGFKNSRIKIEKQVYQKFEKMFIEKLNYLVFKNEVEKAEGGILNAYQ |
| | LTNKFESFNKIGKQSGILYYIPAWCTSKIDPVTGFINRFYIKYENLDKSKEFVNKIEDIRYNSR |
| | EDLFEFDIDYGKFTDKLNDTRNKWTLCSNGERIYTHKNNTGEWIDNRIQLTKEFKKLFEEY |
| | DVDLNNIKPEILQKSNIEFFKGNNENLGFMQLFKLMVQMRNSLTGKDEDNLISPVKNRNG |
| | KFFDTKDQIEGLPKDADANGAYNIARKGLMLVKQMKDTEDENLNKIKYNITEKEWLNYL |
| | QNRGM |

TABLE S4B
Human Codon Optimized Nucleotide Sequences Group 4

| SEQ | Corres- | |
|---|---|---|
| ID | ponding | |
| NO | AA | Sequence |
| 47 | 45 | ATGTCTAACCTGTACAGGAACCTACATAATTTCTACTCTGTACAGAAAACCCT |
| | | CAGATTTGAATTGATTCCCCAGGGAAAAACCAAGGAAAACATGGAAAAAGA |
| | | AGGCATACTGAAGGCCGACGAGCATCGGGCCGAAATCTATAGCAAGGTTAA |
| | | GAAATACTGTGACGAGTATCACAAACTGTTCATAGATAAATGCCTTAAGAAC |
| | | ATTCGGCTGAATGAGCTCAATAAGTATTACGAGTTGTACTCCGTGGTAAAAA |
| | | AAGATGAGAAGCAGAAAGAAGAGTTCATTAAAATCCAGGAAAAGCTGAGAA |
| | | AGCAAATTTCAGAGAGTTTCAGAAACAATAACGAGTATAAGGGCCTTTTCCA |
| | | GAAGGACATCATTAACATCTATCTCATTACCATGTACAAGGACGACAAAGAG |
| | | AAGATCAAGGATATCAGCGAGTTTAACAAATTTACCACTTACTTCAGTGGCT |
| | | ACAACAAAAATAGGGAGAATATGTATTCGGAGGAGGAGAAACCTACCGGAA |
| | | TAGCTTATCGTCTGATTAACGAGAACTTGCCCACCTTTATCGAGAACTTCAAG |
| | | ATCTATAACAAGGTGATCAAGTTTATGCCTGAGATCATCAACAAAATCCATA |
| | | CAGACCTGATGGAATATATCCAGGTCGAAGACATTGATGAGATCTTCGACAT |
| | | CAACTACTATAACGAAGTGTTAACACAGAAAGGCATAGAGTGCTACAATATC |
| | | ATTATTTCTGGCAAGTCAAAGTCCAATGGAGAAAAGATCAAAGGGCTGAATG |
| | | AGTATATCAACGAATTTAACCAGAAGCACAATGAAAAAATCCCAAAGTTAC |
| | | AGGAACTGTACAAACAGATACTTAGCGACACAGATACAGCTAGCTTCAAGTT |
| | | TGATACTATAGAATCTGACGAGGAACTCCTGAATAATATCGAAAGCTACTAT |
| | | ACCAAACTGCTCCCTGTTTTTAACAAAATCAATCAGCTGTTCGCAAAATTTAA |
| | | CAAGTATAACCTGGACCTCATTTTCATTAACAATGATGGAACTCTCAACACA |
| | | ATTAGCAACGAGATATACAAAGATTGGAGCTACATTCGGAATCGAATTGGTG |
| | | AACGATACGATATTGAGTATACCGGGAAATTAAAGAAAGATACGGAGCAAT |
| | | ACAGCAAACAAAAACAGGAGTACATGAAGAAGCAAAAACAGTACAGCCTTA |
| | | AGTTCCTGAATGACAGCCTTCGAGATAACTACTTGATAGAATACATCTCCAA |
| | | CTACATTGAGCAGTCTAAGATAATGGAAAAGATGAAAACCGACTTCACCGA |
| | | AGTGCAGAAGATTGAAAGCAGGGGAGACACCAAACAGTTGATAAAAGACGA |
| | | AAATTCCATCGTGAAAATCAAAAATCTCCTTGACGACATTAAGTTTCTACAG |
| | | GAATTTGCCAAGATCCTAGTGCTTAAAGACAGAACAATCGAGAAGGATGCG |
| | | GAATTTTACAGTGAATTAATGCCGTACTACAATGAGCTGAAAGACATCATAC |
| | | CACTGTATAATAAGACCCGCAACTACCTCACTCAGAAACCTTACTCCACTGA |
| | | GAAAATTAAACTGAACTTCGAGTGTCCTACACTCCTCAATGGGTGGGATCTT |
| | | AATAAAGAGGAGGCTAACCTGGGAGTTATTCTCCTGAAGAACGAGAAGTATT |
| | | ATTTAGGCATCATAAACCCCTACTGTAAGAAGATTTTCAAGATCCAAGAAAA |
| | | GGATAGTAACTCAGAGAACAACTATAAGAAGATGGAATACAAGCTCTTGCC |
| | | CGGTCCCAATAAAATGCTGCCGAAAGTCTTTTTTTCCAAGTCCAAGATAGAT |
| | | GAATTCATGCCATCTGACGAGTTGTTAGAGAAATATAACAAGGGTTGCCACA |
| | | AGAAAGGAAAAGATTTCGACATTAACTTCTGCCATGAACTGATCGATTTTTA |
| | | TAAAACCTCCCTCAATAAGCACAAGGATTGGAAAAAGTTCGACTTTAAGTTC |
| | | AAGTCCACTTCGGAATACAACGACATCTCTGAGTTTTACAAAGATGTTGAAG |
| | | AACAGGGGTACAAAATTGAGTATTCAGAGTACAGTGAGAAATACATTAACG |
| | | AACTGGTGGATCGCGGGGAACTTTATCTGTTTCAAATCTACAACAAGGACTT |
| | | TAGTGAGTATTCGAAAGGGCGTCCAAATCTGCACACCATGTACTGGAAAGCA |
| | | GTGTTCGATATCGAGAACATCAAAAATCCGGTGTATAAGCTGAACGGGGAA |
| | | GCAGAAATCTTCTATAGAAAGAAATCTCTGGAGCGTAAAATTACACACAGTG |
| | | CTAATGAGCCAGTGGCCAATAAGAACGAAAATACAATCAAGTCTGGAAAAC |
| | | CTACGAGTCTTTTCAAGTACGACCTCATAAAGGATAAGCGCTATACGGTGGA |
| | | TAAGTTTCAATTTCATGTCCCAATAACCATGAATTTCAAGTCCGAGAAAATGT |
| | | TTAACATCAATCAGGTAGTCAACAAGTACCTCAAATATAACGATGACATAAA |
| | | CGTGATCGGCATCGACCGCGGGGAGAGGAATTTACTGTATGTCTGTGTCATC |
| | | GATAAGAATGAGAAGATCGTTTACCAAAAGTCTCTAAATGAGATTGTCAACG |
| | | AGTACAAGTCTATCAAGTATTCAACCAACTATCACACACTGCTGAACAAAAA |
| | | AGAGAAAGAGAGAGAGATTGCACGGGAAGACTGGAAGAACATTGAAAACA |
| | | TTAAGGAGTTGAAGGAAGGATATATGAGCCAGGTGATTCACATCTTGGTGGA |
| | | ACTGATGCGGAAATACAATGCCATAATTGTAATCGAAGACCTGAATAAAGGT |
| | | TTTAAGAATTCCCGGATCAAGGTGGAGAAGCAGGTGTATCAGAAGTTTGAGA |
| | | AGATGTTCATTGACAAGCTCAACTATTTGGTGTTTAAAGACGAACCCAAAGA |
| | | GTCCGAAGGCGGCGTCCTAAATGCATATCAGCTGACAAATAAGTTCGAAACG |
| | | TTCAACAAAATCGGCAAGCAATCAGGTGTGCTCTACTATATCCCCGCCTGGT |
| | | GCACAAGCAAGATTGATCCAACTACAGGCTTCATTAACAGGTTCTACATAAA |
| | | GTACGAGAATCTAGATAAGAGCAAGGAGTTCATCAATAAGATCGACGACAT |
| | | TTCATACAATTCCTCCGAAAAACTTTTCGAGTTCGACATCGATTACTCAAAAT |
| | | TTACTGACCGGCTAAACGAGACGAGGAATAAGTGGACTCTTTACACTAATGG |
| | | TGAGCGCATTTATACTTACAGAAATGACAAAGGAGAGTGGATTGATAAGAA |
| | | GATTCAGCTGACAAATGAGTTTAACAAGCTGTTCGAGAAATATAGCATCAAC |
| | | CTGGATAACATCAAAAATGAGATTTTGGAGAAGGCCAATATCGAATTTTTCA |
| | | AGGGTAACAACGAAACCCTGGGGTTTATTCAGTTGTTTAAACTGATGGTCCA |
| | | AATGAGGAATTCTCTGACTGGAAAGGAGGAGGATAATCTTATTAGTCCCGTT |
| | | AAGAACTCAAACGGCAAATTCTTCAATACCAATGAACAGATAGAGGGCTTAC |
| | | CTAAAGATGCTGACGCCAATGGCGCTTATAATATCGCGCGCAAGGGGCTCAT |
| | | GCTGATTGAGCAAATGAGGAATACGGAAGACGATAAGCTGAACAAGATAAA |
| | | GTACAACATCACTGAGAAAGAATGGCTCGACTACGTTCAGAATCGAGGGAT |
| | | GTGA |
| 48 | 46 | ATGCTGTACGACAACATCATTGTGAACGAGATCTACGGCAGGTACGACATGA |
| | | GCAATCTGTACAACAGCCTGCACAACTTCTATCCCGTCCAGAAGACTCTTAA |
| | | GTTCGAACTGATACCTCAGGGGAAGACCAAGGAGAACATGGAGAGAGAGGG |
| | | CATTCTGAAGACCGACCAGCACCGGGCCGCAGTGTATAAGAAGGTGAAGAA |
| | | ATACTGTGACGAATACCACAAAGTGTTCATCGATAGATGCCTGAAAGACCTT |
| | | CAGCTGAAAGAGTTGGAGCGCTATTACGAGCTGTACAGCCTGACCAATAAGG |
| | | ACGACGAGAAGAAAGAGGAGCTGAAGAAGATTCAGGAAAAACTGCGCAAA |
| | | CAGATCAGCGATAGCTTTAAGAACAATAGTGAGTTCAAGGGCCTGTTCCAGA |
| | | AGGATATCATCAATTCTTATCTGATGGCCATGTACAAGGAGGACGAGGAAAA |
| | | GATCAAGGAGATTTCCGAGTTTAACAAGTTCACCACTTATTTTTCTGGGTACA |
| | | ATAAAAATCGCGAGAACATGTATTCAGAAGAGGAGAAGTCTAGCGCTATCA |
| | | GCTATAGGATCATCAACGAGAACCTGCCCACCTTTATCGACAACCTGCGGAT |
| | | CTATAACAAAATTATCAAACTGATTCCCGAGATCATGGAGAAGATCTATACC |
| | | GACCTGATCGAGTACATCCAGGTGGAGAACATCAATAAAGTGTTCAATATTA |
| | | ACCACTACAATAAGGTGCTGACCCAGCGGGGGATCGAATGCTACAATATCAT |
| | | CATCAGTGGAAAGGTGCAGAACGAGGGCGAGAAGATCAAGGGCATCAACGA |
| | | ATACATTAACGAATTCAACCAGACCCATAATGAAAAGATCCCAAAAATGCA |
| | | GGAACTGTACAAACAGATCCTGAGTGATACAGACACCGCTTCTTTCAAGTAC |
| | | GACGTGATCGAGTGTGATAGGGACCTGCTGGACAACATCGAGTCGTATGGAA |
| | | GGAGGATCCTGCAGATCCTGGACGGAACAGGCAGCCTGCTCGAGAAGATCA |
| | | ATGACTATAACCTCGACCTGATCTTCATTAATAATGATGGCATCCTGTCCAAA |
| | | GTTAGCAACGATATTTATTCCGATTGGAGCTACATCAGAAATCGCATTTCCG |
| | | ACATCTACGATGAGAAGTATAACGGTAAGCTGAGCAAAAACACCGAAAAAT |
| | | ACTTCAAACAGAAGCAGGATTACATCAAGAAACAGAAGTGCTACAGCCTGA |
| | | AATTTCTAAAGCAGAGCCTGGAGGATGATAGGGTGATCAAATACATCTCTTC |
| | | CTACATCAGGGAGACCTCACTGGTGGAGAGGATCAGAAGCAGCTTTATCGAG |
| | | GTGCAGAACATTAAAGAGAGATCAAACGAAAAGAATCTGATCAAGGACGAG |
| | | AATAGCATCACAAAGATCAAGACCCTGCTGGACAACATCAAGCTGCTGCAG |
| | | GAGTTCGTGAAGATGCTGATCCCAAAGGACAGAACCGAGGAGAAGGAGGCC |
| | | AAATTCTACTCTGAGCTGATGACATACTACGATGAGCTGGAGAACGTGATCC |
| | | CACTGTACAATAAGACCAGAAATTACCTGACACAGAAGCCCTACTCTACTCA |
| | | GAAGATCAAGCTGAACTTTGAGTGCCCAACACTGCTGAATGGCTGGGACAGC |
| | | AATAAAGAACAGGCTAACCTGGGCGTTATCCTGCTCAAGGACGAGAAGTACT |
| | | ATCTGGGCATCATCAACCCATACTGCCGGAAGATCTTCGAGACAGAGGAACA |
| | | GGACATCAACTCCGAGAACAACTACAAGAAGATGGAATATAAGCAGCTGCC |
| | | CGGCTCAAAGATGCTGGCCAAGGTGTTCTTCTCCAAGAGCCGGAAAGACGAG |
| | | TTTAACCCCAGTGACGAGCTGCTGAAGAAGTACGAAAAGGGCCTCCACAAA |
| | | AAGGGGCCCAACTTCGATATTCAGTTTTGTAGGGAGCTGATCGATTTTTACA |
| | | AGAATAGCCTGAATAAGCACGAAGAATGGAAGAAGTTTGACTTTAAGTTTCG |
| | | CGACACCCTGGAGTATAACAACATCGGGGAGTTTTACAAGGAGTTCGAGGA |
| | | GCAGGGCTATAAGATTGAATACTCTGAATATAGCGAATCCTACATTAACGAA |
| | | CTGGTGAACAGGGGCGAGCTGTATCTGTTCCAGATCTACAATAAGGATTTTT |
| | | CTGAATATTCCAAGGGCAACCCCAATCTCCACACCATGTACTGGAAGGCTGT |
| | | GTTTGACCTGCAGAACATCAAGGATCCCATCTATAAACTGAACGGCAACGCC |
| | | GAAATCTTTTATAGGCAGCGGTCACTGGAAAAAAGAATCACCCACCCCGCTA |
| | | ACACCCCAGTGAACAACAAAAGCGAGGAGACCATCAAAGCCGGAAAGCCCC |
| | | AGTCTATCTTTAAGTATGACCTCATCAAGGATAAGCGGTACACCATGGACAA |
| | | GTTCCAGTTCAATGTGCCCATCACCATGAATTTCAAGTCCGAGAAGCTGCTG |
| | | AACATCAACGGCATCGTGAATAAGTATCTGAAATACAACGACGACATCTACG |
| | | TGATTGGAATCGATAGAGGCGAGCGCAATCTGCTGTATGTGTGTGTTATCGA |
| | | CAAGAACGAGAAAATCGTCTACCAGAAGAGCCTGAACGAGATCGTGAACGA |
| | | ATACAGAAATATTAAGTACTCCATCGACTACCATCTGCTGCTGGACAAGAAG |
| | | GAAAAGGAAAGGGAGGCTGCCCGGGAAGACTGGAAAAATATCGAGAATATC |
| | | AAGGAACTGAAGGAAGGATACATGAGCCAGGTTATCCACGTGCTCATCGAG |
| | | CTGATGAGGAAGTACAACGCTATCATTGTGATCGAGGACCTGAATAAGGGCT |
| | | TCAAAAACAGCCGAATTAAGATCGAAAAACAGGTGTATCAGAAGTTCGAGA |
| | | AGATGTTTATTGAAAAACTGAACTACCTGGTGTTCAAGAACGAAGTGGAAAA |
| | | GGCCGAAGGCGGGATCCTGAACGCCTACCAGCTGACCAATAAGTTTGAATCC |
| | | TTTAATAAGATCGGCAAGCAGAGCGGCATCCTGTACTACATCCCTGCCTGGT |
| | | GTACCAGCAAAATCGATCCAGTGACCGGCTTCATCAACAGATTCTACATTAA |
| | | GTATGAGAATCTGGACAAGAGCAAAGAGTTCGTGAACAAGATCGAAGATAT |
| | | TAGATATAATAGCCGGGAGGACCTGTTCGAATTCGACATCGATTATGGCAAG |
| | | TTTACCGACAAGCTTAACGACACCCGGAACAAATGGACACTGTGCAGTAATG |
| | | GAGAGAGAATCTACACCCATAAGAACAATACAGGAGAGTGGATCGACAACA |
| | | GAATCCAGCTGACCAAAGAGTTTAAAAAGCTGTTCGAGGAGTACGACGTGG |
| | | ACCTGAACAATATTAAACCTGAGATCCTGCAGAAGTCTAACATCGAGTTCTT |
| | | CAAGGGCAACAACGAGAACCTGGGCTTCATGCAACTGTTCAAGCTGATGGTG |
| | | CAGATGCGAAATAGCCTCACCGGCAAGGACGAGGATAATCTGATTAGCCCC |
| | | GTGAAGAATAGGAACGGCAAGTTCTTTGACACCAAAGACCAGATCGAGGGA |
| | | CTGCCCAAGGACGCCGACGCCAACGGCGCCTACAATATTGCCCGGAAGGGC |
| | | CTGATGCTGGTGAAGCAGATGAAGGACACAGAGGACGAGAATCTGAATAAA |
| | | ATTAAATACAACATCACCGAGAAAGAGTGGCTGAACTATCTGCAGAATAGA |
| | | GGCATGTGA |

TABLE S4C
Direct Repeat Group 4

| SEQ ID | Direct Repeat | SEQ ID | Direct Repeat |
|---|---|---|---|
| NO | (Variant #1) | NO | (Variant #2) |
| 49 | GTTTAATACCTTATATAA | 50 | TTTAATACCTTATATAAA |
| | ATTTCTACTATTGTAGAT | | TTTCTACTAT |
| | | | TGTAGAT |
| 51 | GTTTAATACCTTATATAA | 52 | TTTAATACCTTATATAAA |
| | ATTTCTACTATTGTAGAT | | TTTCTACTATTGTAGAT |

TABLE S4D
crRNA Sequences Group 4

| SEQ | | |
|---|---|---|
| ID | | |
| NO | Sequence | FIG. |
| 53 | GUUUAAUACCUUAUAUAAAUUUCUACUAUUGUAGAU | FIG. 4A |
| 54 | GUUUAAUACCUUAUAUAAAUUUCUACUAUUGUAGAU | FIG. 4B |

### Group 5 Sequences (SEQ ID Nos: 57-72)

TABLE S5A
Enzyme Sequences Group 5

| SEQ | |
|---|---|
| ID | |
| NO | Sequence |
| 57 | MKEQFINRYSLSKTLRFSLIPVGETENNFNKNLLLKKDKQRAENYEKVKGYIDRFHKEYIESV |
| | LSKARIEKVNEYANLYWKSNKDDSDIKAMESLENDMRKQISKQLKSNARYKRLFGKELICEDL |
| | PSFLTDKDERETVECFRSFTTYFKGFNTNRENMYSSDEKSTAIAYRCINDNLPRFLDNVKSF |
| | QKVFDNLSDETITKLNTDLYNIFGRNIEDIFSVDYFEFVLAQSGIEIYNSMIGGYTCSDKTKIQ |
| | GLNEYINLYNQQISKNEKSKRLPLIKPLYKQILSEKDSVSFIPEKFNSDNEVLLAIDDYYNNHI |
| | GDFDLLTELLQSLNTYNANGIFVKSGVAITDISNGAFNSWNVLRSAWNEKYEALHPVTSKTKI |
| | DKYIEKRDKVYKAIKSFSLFELQSLGNENGNEITDWYISSINESNRKIKEAYLQAQELLKSDYE |
| | KSYNKRLYKNEKATESVKNLLDTIKEFQKLIKPLNGTSKEENKDELFYGKFTSLYDSVADIDR |
| | LYDKVRNYITQKPYSKDKIKLNFDNPTFLNGWALGNEFANSAQLLRDGDNYYLAIMDKELK |
| | NNIPKKYNSPTNEEDMLQKIIYQQAANPANDIPNLLVIDGVTVKKNGRKEKTGIHAGENIILE |
| | NLRNTYLPDNINRIRKEKTFSTSSENFSKDDLCEYIQYYICRVQEYYSSYNFTFKNASEYKNFP |
| | EFSDDVNSQAYQISYDNISKKQIMELVDNGYIYLFQIYNKDFSKYSKGTPNLHTLYFKMLFDE |
| | RNLSNVVYKLNGEAEMFYREASIGDKEKITHYANQPIENKNPDNKKKESVFEYDIVKDKRFT |
| | KRQFSLHVPITINFKAHGQEFLNYDVRKAVKYKDDNYVIGIDRGERNLIYISVIDSNGKIVEQ |
| | MSLNEIISDNGHKVDYQKLLDTKEKERDKARKNWTSVENIKELKEGYISQVVHKICELVVKY |
| | DAVIAMEDLNFGFKRGRFPVEKQVYQKFENMLISKLNLLIDKKADPTENGGLLRAYQLTNKF |
| | DGVNKAKQNGIIFYVPAWDTSKIDPATGFVNLLKPKCNTSMPEAKKLFETIDDIKYNTNTDM |
| | FEFYIDYSKFPRCNSDFKKSWTVCTNSSRILTFPNKEKNNMWDNKQIVLTDEFKSLFNEFGID |
| | YKGNLKSSILSISNADFYRRLIKLLSLTLQMRNSITGSTLPKDDYLISPVANKNGEFYDSRNYK |
| | GTNAALPCDADANGAYNIARKALWAINVLKDTPDDMLNKAKLSITNAEWLEYTQK |
| 58 | MKEQFINCYPLSKTLRFSLIPVGKTEDNFNKKLLLESDKQRAENYENVKSYIDRFHKEYIKSA |
| ID414 | LANARIEKINEYAALYWKNNKDDSDAKAMESLEDDIRKQISKQLTSTANFKRLFGKELICED |
| | LPAFLTDENEKETVECFRSFTTYFNGFNTNRKNMYSSEKKSTAIAYRCVNDNLPRFLDNIKTFQ |
| | KIFDNLSDETITKLNTDLYNIFGRKIEDIFSVDYFDFVLTQSGIDIYNYMIGGYTCSDGTKIQG |
| | LNECINLYNQQVAKNEKSKRLPLMKPLRKQILSEKDSVSFIPEKFNSDNEVLLAIEEYYNNHIS |
| | DIDSLTELLQSLNTYNANGIFIKSGAAVSDISNAAFNSWNVLRLAWNEKYEALHPVTSTTKID |
| | KYIEKRDKVYKSIKSFSLFELQELGAENGNEITDWYISSINECNRKIKETYLQARELLESDYEK |
| | DYDKRLYKNEKATELVKNLLDAIKEFQQLVKLLNGTGKEENKDELFYGKFTSLYDSVADID |
| | RLYDKVRNYITQRPYSKDKIKLNFDNPQLLGGWDKNKESDYRTVILRKNDFYYLAVMDKSH |
| | SKVFVNAPEITSEDEDYYEKMEYKLLPGPNKMLPKVFFASRNIDKFQPSDRILDIRKRESFKK |
| | GATFNKSECHEFIDYFKESIKKHDDWSKFGFEFSPTESYNDISEFYREVSDQGYYISFSKISK |
| | NYIDKLVENGYLYLFKIYNKDFSKYSKGTPNLHTLYFKMLFDERNLSNVVYKLNGEAEMFYR |
| | EASINDKEKITHHANQPIKNKNPDNEKKESVFEYDIVKDKRFTKRQFSLHVSVTINFKAHGQE |
| | FLNYDVRKAVKYKDDNYVIGIDRGERNLIYISVINSNGEIVEQMSLNEIIGDNGYSVDYQKLL |
| | DKKEKERDKARKNWTSVENIKELKEGYISQVVHKICELVVKYDAVIAMEDLNFGFKRGRFP |
| | VEKQVYQKFENMLISKLNLLIDKKAEPTETGGLLRAYQLTNKFDGVNKAKQNGIIFYVPAW |
| | DTSKIDPVTGFVNLLKPKYTSVREAKKLFETIDDIKYNTNTDMFEFCIDYGKFPRCNSDFKKT |
| | WTVCTNSSRILSFRNEKKNNEWDNKQIVLTDEFKSLFNEFGIDYTSDLKASILSISNADFYNRL |
| | IRLLSLTLQMRNSIIGSTLPEDDYLISPVANDRGEFYDSRNYKGSNAALPCDADANGAYNIAR |
| | KALWAINVLKDTPDDMLQKAKLSITNAEWLEYTQR |
| 59 | MKEQFINCYPLSKTLQFSLIPVGKTDDNFNKKLLLERDKQRAENYEKVKGYIDRFHKEYIESV |
| | LVNARVEKIDEYADLYWKSNKDDSDAKAMESLENDMRKQISKQLKSNARYKRLFGKELICE |
| | DLPSFLTDKEERETVECFRSFTTYFKGLNTNRENMYSSDEKSTAISYRCINDNLPRFLDNVKSF |
| | QKVFDNLSDETITKLNTDLYNTFGRNIEDVFSVDYFEFVLAQSGIDIYNSMIGGYTCSDGTKIQ |
| | GLNECINLYNKQDAKNEKSKRLPLMKPLYKQILSEKDSVSFIPEKFNSDNEVLLSIEDYYSSHI |
| | GDLDLLTELLQSLNTYNANGIFVKSGAAVSDISNGAFNSWNVLRLAWNEKYEALHPVTSKT |
| | NLDNYIEKRDKIYKAIKSFSLFELQSLGNENGNEITDWYISSSKECNSKIKEAYLQARELLKSD |
| | YEKSYNKRLSKNGKATQSIKNILDAIKDFHHLVKSLNCTGKEENKDELFYGKLTSYYDSITDI |
| | DRLYDKVRNYITQKPYSKDKIKLNFDNPQLLGGWDKNKESDYRTVLLRKDDFYYLAVMDK |
| | LHSKAFVDAPNITSKDEDYYEKMEYKLLPGPNKMLPKVFFAAKNIDTFQPSDRILDIRKRESF |
| | KKGATFNKSECHEFIDYFKNSIEKHYDWSQFGFEFTPTENYNDISEFYREISDQGYSVSFNKIS |
| | KSYVDELVDNGYIYLFQIYNKDFSKYSKGTPNLHTLYFKMLFDERNLSNVVYKLNGEAEMFYR |
| | EASINDKEKITHQANQPIENKNPDNEKKESTFEYDIIKDKRFTKRQFSLHVPITINFKAHGQ |
| | EFLNYDVRKAVKYKDDNYVIGIDRGERNLIYISVIDSNGKIVEQMSLNEIISDNGHRVDYQKL |
| | LDTKEKERDKARKNWTSVENIKELKEGYISQVVHKICELVVKYDAVIAMEDLNFGFKRGRFP |
| | VEKQVYQKFENMLISKLNLLIDKKADPTEDGGLLRAYQLTNKFDGVNKAKQNGIIFYVPAW |
| | DTSKIDPVTGFVNLLKPKYTSVSEAKKLFETIDDIKYNANTDMFEFCIDYGKFPRCNSDYKNT |
| | WTVCTNSSRILTCRNKEKNNMWDNKQIVLTDEFKSLFGEFGIDYKGNLKTSILSISNADFYRR |
| | LIKLLSLTLQMRNSITGSTLPEDDYLISPVANDRGEFYDSRNYKGMNAALPCDADANGAYNI |
| | ARKALWAINVLKSTPDDMLNKANLSITNAEWLEYTQK |

TABLE S5B
Human Codon Optimized Nucleotide Sequences Group 5

| | Corres- | |
|---|---|---|
| SEQ | ponding | |
| ID NO | AA | Sequence |
| 60 | 57 | ATGAAAGAGCAATTCATCAACCGCTACTCCCTGTCGAAAACCCTGCGCTTTTCT |
| | | TTGATACCAGTGGGGGAGACGGAGAACAATTTCAATAAGAACTTGCTGCTGAA |
| | | GAAGGACAAGCAACGGGCGGAAAACTACGAGAAGGTGAAGGGATACATTGA |
| | | CCGGTTTCACAAAGAGTATATAGAATCCGTGCTGTCAAAGGCCAGGATCGAGA |
| | | AGGTGAACGAGTATGCCAATTTGTATTGGAAGAGTAACAAAGACGATAGCGA |
| | | TATCAAGGCAATGGAGAGTTTGGAGAACGACATGAGGAAACAAATCTCTAAG |
| | | CAGCTGAAATCCAATGCCCGCTATAAGCGACTGTTCGGGAAAGAATTAATATG |
| | | TGAGGATCTGCCAAGTTTTCTGACAGACAAGGATGAGAGAGAAACAGTCGAA |
| | | TGTTTTCGCTCATTCACCACCTACTTTAAAGGATTTAACACCAATAGGGAGAAT |
| | | ATGTATTCCTCTGATGAGAAAAGTACCGCCATCGCTTACCGTTGCATCAATGAT |
| | | AATCTACCACGGTTCCTTGACAATGTAAAGAGTTTCCAGAAAGTCTTCGATAA |
| | | CCTCTCTGATGAGACTATTACTAAACTTAACACCGACCTGTATAACATTTTTGG |
| | | ACGCAATATAGAGGACATTTTTTCCGTGGACTATTTCGAATTCGTGCTCGCTCA |
| | | GAGCGGTATCGAAATTTATAATAGCATGATTGGAGGCTACACTTGTTCAGACA |
| | | AAACTAAAATCCAGGGCCTCAACGAGTACATCAACTTATACAATCAACAGATC |
| | | AGCAAGAATGAGAAGTCAAAAAGGCTGCCCCTTATTAAACCTCTGTACAAGCA |
| | | GATTCTTTCTGAAAAGGATTCCGTTAGCTTCATTCCCGAGAAATTTAATTCGGA |
| | | CAACGAGGTACTCCTGGCCATCGACGATTATTATAATAATCATATCGGCGACT |
| | | TCGACCTGCTGACGGAACTCCTACAGAGCCTCAACACGTACAACGCCAATGGG |
| | | ATATTTGTGAAGTCTGGCGTGGCTATCACTGATATCTCTAATGGTGCCTTTAAT |
| | | TCATGGAACGTCCTGCGGTCAGCTTGGAATGAGAAATATGAGGCGCTTCACCC |
| | | AGTGACTAGCAAGACCAAAATCGACAAATACATTGAGAAGAGAGACAAAGTC |
| | | TATAAAGCCATCAAAAGCTTTAGCCTGTTTGAACTGCAGTCCCTCGGGAATGA |
| | | AAATGGCAATGAGATAACTGACTGGTATATCAGTAGCATTAACGAGTCCAACA |
| | | GGAAAATCAAGGAAGCGTATTTGCAGGCCCAGGAACTCCTGAAGTCTGACTAC |
| | | GAAAAAAGCTACAATAAGAGGCTTTACAAGAACGAAAAGGCAACTGAGAGCG |
| | | TCAAAAACCTTTTGGATACCATAAAAGAGTTCCAGAAGCTGATTAAGCCATTG |
| | | AATGGCACATCAAAGGAAGAGAACAAAGATGAGCTGTTTTATGGTAAATTCA |
| | | CGTCCCTATACGACTCCGTGGCTGACATAGACCGGCTGTACGACAAGGTTCGA |
| | | AATTACATCACCCAGAAGCCCTACTCTAAGGATAAGATCAAGCTGAACTTTGA |
| | | CAACCCTACCTTCCTGAATGGCTGGGCACTGGGGAACGAGTTCGCTAATAGCG |
| | | CTCAACTGTTAAGAGACGGTGACAACTACTACCTCGCAATTATGGACAAGGAG |
| | | CTGAAAAATAACATTCCGAAGAAGTACAACAGCCCAACAAACGAGGAGGATA |
| | | TGTTACAGAAAATCATTTACCAGCAAGCCGCCAACCCTGCAAACGATATTCCC |
| | | AATCTACTCGTAATAGATGGTGTGACCGTGAAAAAGAACGGCCGCAAGGAGA |
| | | AGACCGGCATTCATGCAGGCGAAAATATCATTCTGGAGAACTTGAGGAACACT |
| | | TATCTTCCCGATAATATTAACCGGATACGTAAGGAGAAAACATTTTCAACGAG |
| | | CAGTGAAAACTTTAGCAAAGACGATCTGTGCGAGTACATCCAATACTATATTT |
| | | GTAGAGTTCAGGAGTACTATTCCTCCTATAACTTCACTTTTAAGAACGCCTCCG |
| | | AGTATAAAAATTTTCCCGAGTTTAGTGATGACGTGAATTCTCAGGCATACCAG |
| | | ATTAGCTATGACAACATAAGCAAGAAACAGATTATGGAGCTTGTTGACAATGG |
| | | CTATATTTACCTCTTCCAGATCTACAACAAAGATTTCAGCAAATACTCCAAGG |
| | | GGACACCAAACCTGCACACTCTATATTTCAAGATGCTGTTTGATGAGCGTAAT |
| | | CTGTCCAATGTCGTTTACAAGCTTAACGGCGAAGCTGAAATGTTCTACAGAGA |
| | | AGCCAGTATTGGGGACAAAGAGAAGATTACCCACTACGCTAATCAACCTATAG |
| | | AGAACAAGAATCCTGATAACAAGAAGAAAGAGTCTGTTTTTGAGTATGACATC |
| | | GTTAAGGACAAGCGATTTACGAAGCGCCAATTCAGCCTTCATGTCCCCATAAC |
| | | AATTAACTTCAAGGCTCATGGACAGGAATTCCTCAACTATGATGTGCGAAAAG |
| | | CCGTCAAGTACAAGGATGATAACTATGTGATCGGAATTGACCGTGGCGAGAG |
| | | AAACTTAATATACATCAGTGTTATCGACTCGAACGGGAAAATCGTGGAACAAA |
| | | TGTCGCTGAACGAAATCATTAGTGACAATGGACACAAGGTGGATTATCAGAAG |
| | | CTCTTGGATACAAAGGAAAAGGAAAGGGATAAGGCTCGCAAAAATTGGACAT |
| | | CTGTCGAAAACATCAAAGAACTAAAGGAAGGTTACATCTCTCAGGTGGTGCAC |
| | | AAGATCTGCGAATTAGTCGTTAAATACGATGCTGTAATTGCAATGGAAGACCT |
| | | GAATTTTGGGTTTAAACGGGGAAGATTTCCTGTGGAAAAACAGGTGTATCAGA |
| | | AATTCGAGAACATGCTCATCTCCAAACTGAACCTTCTCATCGACAAGAAAGCG |
| | | GATCCCACTGAGAATGGAGGATTACTCCGGGCCTACCAGCTGACAAATAAGTT |
| | | TGACGGCGTCAATAAGGCTAAGCAGAACGGAATCATCTTCTATGTACCCGCCT |
| | | GGGATACATCAAAGATTGACCCGGCCACAGGATTCGTGAATCTGTTGAAACCG |
| | | AAATGCAACACATCTATGCCTGAAGCCAAGAAGCTCTTCGAAACAATTGACGA |
| | | CATTAAGTACAACACTAATACCGACATGTTCGAATTTTACATTGATTACTCCAA |
| | | GTTCCCTCGCTGCAATTCAGATTTCAAAAAATCATGGACCGTATGCACAAATT |
| | | CTAGTAGAATCCTGACCTTCCCTAATAAGGAGAAAAACAACATGTGGGACAAT |
| | | AAACAGATCGTGCTGACAGATGAATTCAAGTCCTTATTCAACGAGTTTGGGAT |
| | | CGATTATAAAGGCAACCTGAAGTCAAGCATCCTCAGTATTTCAAATGCTGATT |
| | | TCTACAGGAGGCTCATCAAACTCCTGTCTTTGACTCTTCAGATGCGAAATTCTA |
| | | TAACCGGGTCGACTCTGCCAAAGGACGATTATCTAATCTCCCCCGTCGCAAAT |
| | | AAGAACGGGGAGTTCTACGACAGCCGGAACTATAAAGGCACCAACGCGGCCT |
| | | TGCCATGTGATGCCGACGCCAACGGTGCTTACAATATCGCCAGAAAGGCACTT |
| | | TGGGCGATAAATGTGCTCAAGGATACCCCCGACGATATGTTGAATAAGGCAAA |
| | | ATTGTCCATCACCAACGCAGAATGGCTGGAGTATACCCAAAAATGA |
| 61 | 58 | ATGAAGGAACAATTCATCAATTGCTACCCCCTGAGCAAAACACTGAGATTCAG |
| | | CCTGATCCCCGTCGGAAAAACAGAGGACAATTTCAACAAAAAGTTGTTGCTGG |
| | | AAAGCGATAAGCAGAGAGCCGAAAACTACGAGAACGTGAAAAGCTACATCGA |
| | | TCGATTCCACAAGGAGTACATCAAGAGCGCCCTGGCCAATGCTAGAATCGAGA |
| | | AGATCAATGAATACGCCGCTCTGTACTGGAAGAACAACAAGGATGATAGTGA |
| | | TGCCAAGGCCATGGAGAGCCTCGAGGACGACATCCGCAAGCAGATCTCTAAA |
| | | CAGCTGACTAGCACCGCCAATTTCAAGAGACTGTTTGGGAAGGAGCTGATCTG |
| | | CGAGGACCTGCCGGCCTTTCTGACTGATGAGAACGAGAAGGAAACCGTGGAA |
| | | TGCTTCAGAAGCTTCACCACGTACTTTAACGGCTTCAACACCAACAGAAAGAA |
| | | TATGTACTCTAGCGAGAAGAAGTCCACAGCCATCGCCTATAGATGCGTGAACG |
| | | ATAATCTGCCTAGATTTCTGGACAATATCAAGACATTCCAGAAGATCTTCGAC |
| | | AACCTGTCCGATGAGACAATCACAAAGCTGAATACAGATCTGTACAATATCTT |
| | | CGGCAGAAAGATCGAAGACATTTTTAGCGTGGACTATTTCGATTTCGTACTGA |
| | | CCCAGTCCGGCATTGACATCTACAACTACATGATCGGCGGATACACCTGCAGC |
| | | GACGGCACCAAAATTCAGGGCCTAAATGAGTGTATCAACCTGTATAACCAGCA |
| | | GGTGGCCAAGAATGAGAAAAGCAAGCGCCTGCCTCTGATGAAGCCACTGAGA |
| | | AAGCAGATCCTGTCTGAAAAAGATTCTGTGTCTTTCATCCCCGAAAAGTTCAA |
| | | CAGCGACAACGAGGTGCTGCTCGCCATCGAAGAGTATTACAACAACCACATCT |
| | | CCGACATCGACAGCCTGACCGAGCTGCTGCAGAGCCTGAATACCTACAACGCC |
| | | AACGGCATCTTCATCAAATCAGGCGCCGCCGTGTCAGACATCAGCAACGCCGC |
| | | TTTTAACAGCTGGAACGTGCTGAGGCTGGCCTGGAACGAAAAGTACGAGGCCC |
| | | TGCATCCTGTGACCAGCACCACCAAGATCGACAAATACATCGAGAAAAGGGA |
| | | CAAGGTGTACAAGAGCATCAAGTCCTTCAGCCTGTTCGAGCTGCAAGAGCTGG |
| | | GAGCTGAGAACGGCAACGAGATCACCGACTGGTACATCTCCAGCATCAACGA |
| | | GTGCAACAGAAAAATAAAAGAAACCTACCTGCAGGCCAGAGAGCTGCTGGAG |
| | | AGCGACTATGAGAAGGACTATGATAAACGGCTGTACAAAAACGAAAAGGCCA |
| | | CAGAGCTGGTGAAGAATCTGCTGGACGCCATCAAGGAATTTCAGCAACTGGTG |
| | | AAGCTCCTGAACGGTACAGGCAAGGAGGAAAACAAGGATGAGCTCTTTTACG |
| | | GCAAGTTCACATCTCTCTACGACAGCGTTGCCGATATCGATAGACTTTACGAC |
| | | AAAGTGCGGAACTACATTACACAGCGGCCTTACTCTAAGGACAAAATCAAGCT |
| | | GAACTTCGACAACCCCCAGTTGCTGGGCGGATGGGATAAAAACAAGGAAAGC |
| | | GACTACAGAACCGTGATCCTGAGGAAGAACGACTTTTATTACCTGGCTGTGAT |
| | | GGACAAAAGCCACAGCAAGGTGTTCGTGAACGCCCCTGAGATCACCAGCGAA |
| | | GATGAGGACTACTACGAGAAGATGGAATATAAGCTGCTGCCAGGCCCCAATA |
| | | AGATGCTGCCTAAGGTGTTCTTCGCCTCCCGGAATATCGACAAGTTCCAGCCT |
| | | AGCGACCGCATCCTGGATATTCGGAAGCGGGAATCTTTTAAGAAGGGCGCCAC |
| | | CTTCAACAAGTCCGAATGCCACGAGTTTATCGACTACTTCAAGGAATCAATTA |
| | | AGAAGCACGACGACTGGTCCAAGTTCGGCTTTGAGTTCTCTCCTACCGAGAGC |
| | | TACAACGATATCAGTGAGTTCTACAGAGAGGTGAGCGATCAGGGCTACTACAT |
| | | CAGCTTCAGCAAGATCAGTAAGAACTACATCGACAAACTTGTGGAGAATGGCT |
| | | ACCTGTACCTGTTTAAAATCTACAACAAGGACTTCAGCAAATACTCCAAGGGC |
| | | ACACCTAACCTGCATACCCTGTACTTCAAGATGCTGTTCGACGAGCGGAACCT |
| | | CAGCAACGTGGTCTACAAACTGAACGGAGAGGCCGAGATGTTCTACAGAGAA |
| | | GCTAGCATTAACGACAAGGAAAAGATCACCCACCACGCCAACCAGCCTATCA |
| | | AGAACAAGAATCCTGATAACGAGAAAAAGGAAAGCGTGTTTGAGTACGACAT |
| | | CGTGAAGGATAAGAGATTCACCAAGCGGCAGTTCAGCCTGCACGTGTCTGTCA |
| | | CAATCAATTTCAAAGCCCACGGACAGGAGTTCCTGAACTACGACGTGCGGAAG |
| | | GCTGTGAAGTACAAGGACGACAACTACGTGATCGGCATCGATAGAGGCGAGA |
| | | GAAACCTGATCTACATCAGCGTTATCAACAGCAACGGCGAGATCGTGGAACA |
| | | GATGAGCCTGAACGAAATCATTGGCGACAACGGCTACTCTGTGGACTATCAGA |
| | | AGCTGCTGGACAAGAAAGAGAAGGAAAGAGATAAGGCGAGAAAGAATTGGA |
| | | CCTCCGTCGAGAACATCAAGGAACTGAAGGAGGGCTACATCAGCCAGGTGGT |
| | | GCACAAGATATGTGAACTGGTGGTGAAGTACGATGCCGTGATCGCCATGGAA |
| | | GATCTGAACTTCGGATTCAAAAGAGGCAGATTCCCCGTGGAAAAGCAAGTGTA |
| | | CCAGAAGTTCGAAAACATGCTGATCAGCAAGCTGAACCTGCTGATTGACAAGA |
| | | AAGCAGAGCCTACAGAGACCGGCGGCCTGCTGCGGGCCTACCAACTGACAAA |
| | | CAAGTTCGACGGCGTGAACAAAGCCAAGCAGAACGGCATCATCTTCTACGTGC |
| | | CTGCCTGGGACACCTCTAAGATCGACCCTGTGACTGGCTTCGTGAACCTGCTG |
| | | AAGCCCAAGTATACCTCGGTGCGGGAGGCCAAGAAGCTGTTCGAGACCATCG |
| | | ACGATATCAAGTACAACACCAACACAGACATGTTCGAGTTCTGCATCGATTAC |
| | | GGCAAATTCCCTAGATGTAACAGCGACTTCAAGAAAACCTGGACAGTGTGCAC |
| | | CAACTCTAGCCGGATCCTGAGCTTCAGAAACGAAAAGAAAAACAACGAGTGG |
| | | GACAACAAGCAAATCGTCCTGACCGACGAATTCAAGTCTCTGTTCAACGAGTT |
| | | TGGCATCGATTACACCTCGGACCTGAAAGCTAGCATCCTGTCTATCAGCAACG |
| | | CTGACTTCTACAATAGACTGATCCGGCTGCTATCTCTGACACTGCAGATGCGTA |
| | | ACAGCATCATCGGTAGCACCCTGCCCGAGGACGACTACCTGATCAGCCCTGTG |
| | | GCCAACGACCGGGGAGAATTCTACGACAGCAGAAACTACAAAGGCTCCAACG |
| | | CCGCCCTTCCATGTGACGCCGACGCCAACGGCGCTTACAATATCGCCCGGAAA |
| | | GCCCTGTGGGCTATCAACGTGCTGAAGGATACCCCTGACGATATGCTGCAGAA |
| | | GGCCAAGCTCAGCATCACCAATGCCGAGTGGCTGGAATACACCCAGAGA |
| 62 | 59 | ATGAAGGAACAGTTCATCAACTGCTACCCTCTGTCCAAAACACTGCAGTTCAG |
| | | CCTGATCCCCGTGGGCAAGACCGATGATAACTTCAATAAAAAGCTGCTGTTAG |
| | | AGCGGGACAAGCAGCGGGCCGAGAACTACGAGAAGGTGAAGGGCTACATTGA |
| | | CAGATTTCACAAAGAGTACATCGAAAGCGTCCTGGTGAACGCAAGAGTTGAA |
| | | AAGATCGACGAGTACGCCGACCTGTACTGGAAGAGCAATAAGGACGATAGCG |
| | | ACGCCAAGGCCATGGAGAGCCTGGAAAACGACATGCGGAAGCAGATCTCTAA |
| | | GCAACTGAAGAGCAACGCCCGGTACAAAAGACTGTTCGGCAAAGAGCTGATC |
| | | TGTGAGGACCTGCCTTCCTTCCTGACCGACAAGGAAGAGCGCGAAACCGTGGA |
| | | GTGTTTTCGGAGCTTCACCACCTACTTTAAGGGCCTGAACACGAACAGAGAGA |
| | | ACATGTACAGCAGCGACGAGAAGAGCACCGCCATAAGCTACCGCTGCATCAA |
| | | CGACAACCTTCCTAGATTCCTGGATAATGTGAAGTCTTTCCAGAAAGTGTTCG |
| | | ACAATCTGTCCGACGAAACCATCACCAAGCTCAACACAGATCTGTATAACACA |
| | | TTCGGAAGAAACATCGAGGACGTGTTCTCTGTGGACTACTTTGAGTTCGTGCTC |
| | | GCTCAGAGCGGCATCGACATCTACAACAGCATGATTGGCGGCTACACATGCAG |
| | | CGACGGAACAAAGATCCAGGGCCTGAACGAATGCATCAACCTGTACAACAAG |
| | | CAAGATGCCAAGAACGAGAAATCTAAGAGACTGCCTCTGATGAAGCCTCTGTA |
| | | CAAGCAGATCCTCAGCGAGAAGGATTCTGTCTCCTTCATCCCTGAGAAGTTTA |
| | | ACAGCGACAACGAGGTCCTGCTGAGCATCGAGGACTACTACTCTAGCCACATC |
| | | GGCGACCTGGACCTGCTAACCGAGCTGCTGCAAAGCCTGAACACCTATAACGC |
| | | TAACGGAATCTTCGTGAAAAGCGGCGCCGCTGTGAGTGATATCAGCAACGGA |
| | | GCCTTCAACAGCTGGAACGTCCTGCGGCTGGCCTGGAACGAAAAATACGAGG |
| | | CCCTGCACCCCGTGACCAGCAAGACCAATCTGGACAACTACATCGAGAAGAG |
| | | AGATAAGATCTACAAAGCCATCAAGAGCTTCAGCCTGTTTGAGCTGCAGAGCC |
| | | TGGGCAACGAGAATGGAAATGAGATCACCGACTGGTACATCAGCTCTAGCAA |
| | | GGAGTGTAATTCCAAAATCAAGGAGGCCTACCTGCAGGCCAGAGAACTGTTG |
| | | AAAAGCGATTACGAGAAGTCCTACAACAAGAGACTGTCGAAGAACGGCAAGG |
| | | CCACCCAGTCCATCAAAAATATCCTGGATGCCATCAAAGACTTCCACCACCTG |
| | | GTGAAGTCACTGAACTGTACAGGCAAGGAGGAAAACAAGGATGAGCTGTTCT |
| | | ACGGCAAGCTGACCAGCTATTACGATAGCATCACCGACATCGATAGACTGTAC |
| | | GACAAGGTGCGGAACTACATCACTCAGAAACCTTACAGCAAGGACAAGATCA |
| | | AGCTGAATTTCGACAACCCCCAGCTGCTCGGCGGATGGGACAAGAACAAGGA |
| | | AAGCGATTACAGAACCGTGCTGCTGCGTAAGGACGACTTCTACTACCTGGCGG |
| | | TGATGGACAAACTTCATTCAAAAGCCTTCGTGGACGCCCCTAATATCACCTCC |
| | | AAGGATGAGGATTACTACGAGAAAATGGAATACAAGCTGCTGCCCGGCCCTA |
| | | ACAAAATGCTGCCAAAGGTGTTCTTCGCCGCCAAGAACATCGACACATTTCAG |
| | | CCTAGCGATCGGATCCTCGACATCAGAAAGCGGGAAAGCTTCAAAAAGGGCG |
| | | CTACCTTTAACAAGTCAGAATGCCACGAGTTCATCGACTATTTTAAGAACAGC |
| | | ATCGAGAAGCACTACGACTGGAGCCAGTTCGGCTTCGAATTCACACCTACCGA |
| | | GAATTACAACGACATCAGCGAGTTCTACCGGGAGATTAGCGACCAGGGCTACT |
| | | CTGTCAGCTTTAACAAGATCTCCAAATCCTACGTGGATGAGCTGGTGGATAAT |
| | | GGCTACATCTATCTGTTCCAGATCTACAACAAAGACTTCAGTAAATACAGCAA |
| | | GGGCACCCCAAACCTGCATACCCTGTACTTCAAAATGCTGTTCGACGAAAGAA |
| | | ACCTGAGCAACGTGGTGTACAAGCTGAACGGCGAGGCCGAGATGTTCTACAG |
| | | AGAGGCTTCTATAAACGACAAAGAAAAGATCACACACCAGGCCAACCAGCCT |
| | | ATCGAAAACAAGAACCCCGACAACGAGAAGAAAGAATCTACCTTCGAGTACG |
| | | ACATCATCAAGGACAAGCGGTTCACCAAGCGACAGTTCAGCCTGCACGTGCCT |
| | | ATCACCATCAACTTCAAGGCCCACGGCCAGGAGTTTCTGAACTACGATGTGCG |
| | | GAAGGCCGTGAAGTATAAGGACGACAACTATGTGATAGGCATCGATAGAGGC |
| | | GAGAGAAACCTGATCTACATCAGCGTGATCGATTCTAACGGCAAAATCGTGGA |
| | | ACAGATGAGCCTGAATGAAATCATCAGCGACAATGGCCACAGAGTGGACTAC |
| | | CAGAAGCTGCTCGACACCAAGGAAAAGGAACGGGATAAGGCCCGGAAGAACT |
| | | GGACCAGCGTGGAAAACATCAAGGAGCTGAAGGAAGGCTACATCTCTCAGGT |
| | | GGTGCACAAGATCTGCGAGCTGGTGGTCAAATATGACGCCGTTATCGCCATGG |
| | | AAGATCTGAACTTCGGCTTCAAGAGAGGCAGATTTCCTGTGGAAAAACAAGTG |
| | | TACCAAAAGTTCGAGAACATGCTCATTTCTAAACTGAACCTGCTGATCGACAA |
| | | GAAGGCCGATCCTACAGAGGACGGTGGCCTGCTTAGAGCCTACCAGCTGACA |
| | | AACAAGTTCGACGGCGTGAACAAGGCTAAGCAGAACGGCATCATCTTCTACGT |
| | | GCCCGCTTGGGACACCAGCAAGATCGACCCCGTGACCGGATTTGTGAACCTGC |
| | | TGAAGCCTAAGTACACAAGTGTGTCTGAAGCTAAGAAGCTCTTCGAAACAATC |
| | | GACGATATCAAGTACAATGCCAACACCGACATGTTCGAGTTCTGCATCGACTA |
| | | CGGCAAGTTCCCAAGATGCAATAGCGATTACAAGAACACTTGGACAGTGTGCA |
| | | CCAACAGCTCCAGGATCCTGACCTGTAGAAACAAGGAAAAGAATAACATGTG |
| | | GGATAATAAGCAGATCGTTCTGACCGATGAGTTCAAGAGCCTGTTTGGCGAAT |
| | | TTGGAATTGACTACAAGGGCAATCTGAAAACCTCCATCCTGTCTATCAGCAAC |
| | | GCCGACTTCTACCGGAGACTGATCAAGCTGCTGAGCCTGACCCTGCAGATGAG |
| | | AAACAGCATCACCGGCAGCACATTGCCAGAGGATGACTACCTGATCAGCCCCG |
| | | TGGCCAATGACAGAGGAGAATTCTACGACAGCCGGAATTACAAGGGCATGAA |
| | | CGCCGCTCTGCCGTGCGACGCTGATGCGAATGGCGCTTACAACATCGCTAGAA |
| | | AGGCCCTGTGGGCCATCAACGTGCTGAAGTCTACACCTGACGACATGCTGAAC |
| | | AAGGCCAACCTCTCTATCACTAACGCTGAATGGCTGGAGTATACACAGAAG |

TABLE S5C
Direct Repeat Group 5

| SEQ ID | Direct Repeat | SEQ ID | Direct Repeat |
|---|---|---|---|
| NO | (Variant #1) | NO | (Variant #2) |
| 63 | ATCTACAACAGTAGAAATT | 64 | ATCTACAACAGTAGAAAT |
| | ATTAGG | | TATTAGG |
| 65 | GATTAATAATCCCTAATAA | 66 | ATTAATAATCCCTAATAA |
| | TTTCTACTGTTGTAGAT | | TTTCTACTGTTGTAGAT |
| 67 | ATCTACAACAGTAGAAATT | 68 | ATCTACAACAGTAGAAAT |
| | ATTAGGGATTATTAATC | | TATTAGGGATTATTAATC |

TABLE S5D
crRNA Sequences Group 5

| SEQ | | |
|---|---|---|
| ID | | |
| NO | Sequence | FIG |
| 69 | CCUAAUAAUUUCUACUGUUGUAGAU | FIG. 5A |
| 70 | GAUUAAUAAUCCCUAAUAAUUUCUACUGUUGUAGAU | FIG. 5B |
| 71 | GAUUAAUAAUCCCUAAUAAUUUCUACUGUUGUAGAU | FIG. 5C |

TABLE S5E
Consensus Sequence Group 5

| SEQ | |
|---|---|
| ID | |
| NO | Consensus Sequence |
| 72 | MKEQFINCYPLSKTLRFSLIPVGKTEDNFNKKLLLEXDKQRAE |
| | NYEKVKGYIDRFHKEYIESVLXNARIEKINEYAXLYWKSNKDD |
| | SDAKAMESLENDMRKQISKQLKSNARYKRLFGKELICEDLPSF |
| | LTDKXERETVECFRSFTTYFKGFNTNRENMYSSDEKSTAIAYR |
| | CINDNLPRFLDNVKSFQKVFDNLSDETITKLNTDLYNIFGRNI |
| | EDIFSVDYFEFVLAQSGIDIYNSMIGGYTCSDGTKIQGLNECI |
| | NLYNQQXAKNEKSKRLPLMKPLYKQILSEKDSVSFIPEKFNSD |
| | NEVLLAIEDYYNNHIGDXDLLTELLQSLNTYNANGIFVKSGAA |
| | VSDISNGAFNSWNVLRLAWNEKYEALHPVTSKTKIDKYIEKRD |
| | KVYKAIKSFSLFELQSLGNENGNEITDWYISSINECNRKIKEA |
| | YLQARELLKSDYEKSYNKRLYKNEKATESVKNLLDAIKEFQXL |
| | VKXLNGTGKEENKDELFYGKFTSLYDSVADIDRLYDKVRNYIT |
| | QKPYSKDKIKLNFDNPQLLGGWDKNKESDYRTVLLRKXDFYYL |
| | AVMDKXHSKXFVXAPNITSXDEDYYEKMEYKLLPGPNKMLPKV |
| | FZZZZZZZZZZZZZZZZZZFAXXNIZZZZZZDTFQPSDRILDI |
| | RKRESFKKGAZTFNKSECHEFIDYFKXSIXKHYDWSXFGFEFX |
| | PTEXYNDISEFYREVSDQGYXISFXKISKXYIDELVDNGYIYL |
| | FQIYNKDFSKYSKGTPNLHTLYFKMLFDERNLSNVVYKLNGEA |
| | EMFYREASINDKEKITHXANQPIENKNPDNEKKESVFEYDIVK |
| | DKRFTKRQFSLHVPITINFKAHGQEFLNYDVRKAVKYKDDNYV |
| | IGIDRGERNLIYISVIDSNGKIVEQMSLNEIISDNGHXVDYQK |
| | LLDTKEKERDKARKNWTSVENIKELKEGYISQVVHKICELVVK |
| | YDAVIAMEDLNFGFKRGRFPVEKQVYQKFENMLISKLNLLIDK |
| | KADPTEXGGLLRAYQLTNKFDGVNKAKQNGIIFYVPAWDTSKI |
| | DPVTGFVNLLKPKYZTSVXEAKKLFETIDDIKYNTNTDMFEFC |
| | IDYGKFPRCNSDFKKTWTVCTNSSRILTFRNKEKNNMWDNKQI |
| | VLTDEFKSLFNEFGIDYKGNLKXSILSISNADFYRRLIKLLSL |
| | TLQMRNSITGSTLPEDDYLISPVANDRGEFYDSRNYKGXNAAL |
| | PCDADANGAYNIARKALWAINVLKDTPDDMLNKAKLSITNAEW |
| | LEYTQK |

Wherein: each X is independently selected from any naturally occurring amino acid; and each Z is independently selected from absent and any naturally occurring amino acid.

TABLE S5F
Native Nucleotide Sequences Group 5

| SEQ | Corresponding | |
|---|---|---|
| ID NO | AA | Sequence |
| 73 | 57 | ATGAAAGAACAGTTTATAAATCGTTATTCATTATCTAAAACTTTAAGATTCTC |
| | | TTTAATTCCCGTTGGGGAAACAGAAAATAATTTTAATAAAAATCTTTTGCTTA |
| | | AAAAAGATAAACAACGAGCAGAAAATTATGAAAAGGTTAAAGGCTATATTGA |
| | | TCGCTTTCACAAAGAATATATTGAATCCGTGTTGAGCAAAGCAAGAATTGAA |
| | | AAAGTTAATGAATATGCAAATTTATATTGGAAAAGCAACAAGGATGATTCCG |
| | | ATATAAAGGCTATGGAATCATTAGAAAATGATATGCGTAAGCAAATATCAAA |
| | | ACAGCTCAAATCAAATGCACGCTATAAAAGACTGTTTGGAAAAGAACTTATA |
| | | TGTGAAGATTTACCGTCTTTTTTAACGGATAAAGACGAGAGAGAAACAGTTG |
| | | AGTGCTTTAGAAGCTTTACAACATATTTCAAAGGCTTTAATACTAATCGAGAA |
| | | AACATGTATTCAAGTGATGAAAAATCAACTGCAATAGCTTATCGTTGCATAAA |
| | | TGACAACCTACCACGCTTTTTAGATAATGTAAAAAGTTTTCAAAAAGTATTTG |
| | | ATAATCTTTCTGATGAAACTATCACAAAGCTAAACACAGATTTATATAATATA |
| | | TTCGGCAGAAATATTGAAGATATTTTTTCTGTTGATTACTTTGAATTTGTTTTA |
| | | GCTCAATCGGGCATTGAAATTTATAATTCTATGATTGGCGGATACACTTGCTC |
| | | TGACAAAACTAAAATCCAAGGTCTTAATGAATACATAAATCTTTATAACCAGC |
| | | AGATTTCAAAAAATGAAAAATCAAAAAGATTGCCATTGATAAAACCTTTATA |
| | | TAAACAAATTTTGAGTGAAAAGGACAGCGTATCGTTCATTCCCGAGAAATTCA |
| | | ATTCAGACAATGAAGTGTTGCTTGCGATTGATGATTATTATAACAACCACATT |
| | | GGTGATTTTGATTTACTAACAGAGCTTTTGCAATCATTAAACACTTATAATGC |
| | | CAATGGAATATTTGTAAAATCAGGTGTGGCCATTACTGATATTTCAAACGGTG |
| | | CATTTAACTCATGGAATGTATTACGCTCAGCTTGGAATGAGAAATACGAAGCA |
| | | TTGCATCCCGTAACAAGCAAAACAAAAATTGATAAATATATTGAAAAACGAG |
| | | ACAAGGTATATAAAGCAATAAAAAGCTTTTCGCTTTTTGAGCTTCAAAGCCTT |
| | | GGCAACGAAAACGGCAACGAAATAACCGATTGGTATATTTCCTCAATCAATG |
| | | AAAGTAACAGAAAAATAAAAGAAGCTTATTTGCAGGCACAGGAATTACTGAA |
| | | ATCCGATTATGAAAAAAGCTACAATAAAAGACTTTATAAAAATGAAAAAGCA |
| | | ACAGAGTCAGTTAAAAACCTGCTTGACACAATAAAGGAATTTCAAAAGCTTA |
| | | TTAAGCCGTTAAACGGTACCAGTAAGGAAGAAAACAAGGATGAACTTTTTTA |
| | | CGGCAAATTCACTTCACTTTATGACTCGGTAGCAGATATTGACAGGCTTTACG |
| | | ATAAGGTTAGAAACTATATTACCCAAAAGCCTTATTCCAAAGATAAAATTAA |
| | | ATTGAATTTTGACAATCCTACTTTCTTAAACGGTTGGGCATTAGGAAACGAAT |
| | | TTGCAAATTCTGCACAATTGCTTAGAGATGGTGATAATTACTATCTTGCAATT |
| | | ATGGATAAAGAATTAAAAAACAATATACCAAAAAAATACAATTCACCAACCA |
| | | ACGAAGAAGATATGCTGCAAAAGATTATTTATCAACAGGCTGCTAATCCGGC |
| | | AAACGATATTCCAAATCTTCTTGTTATTGATGGAGTAACTGTAAAAAAGAACG |
| | | GAAGAAAAGAAAAAACAGGAATACATGCAGGTGAAAATATCATATTGGAAA |
| | | ATCTTAGAAACACCTATCTTCCCGACAACATAAATCGTATAAGAAAAGAAAA |
| | | AACATTTTCAACATCAAGCGAAAACTTTTCAAAAGATGACTTGTGCGAGTATA |
| | | TCCAATATTATATCTGCCGTGTACAAGAATACTATTCTTCATACAACTTCACCT |
| | | TTAAAAATGCCTCAGAATATAAAAACTTCCCAGAGTTTTCAGATGATGTAAAC |
| | | TCACAGGCATATCAAATTAGCTATGATAATATTTCAAAAAAGCAAATTATGGA |
| | | ACTTGTAGACAACGGATATATCTATCTTTTCCAAATCTACAATAAAGACTTTT |
| | | CAAAGTACAGCAAAGGAACTCCTAATTTACATACTCTGTATTTCAAAATGCTT |
| | | TTTGACGAGAGAAACTTATCAAATGTAGTTTATAAACTCAACGGTGAGGCAG |
| | | AGATGTTCTACCGTGAAGCAAGTATCGGTGATAAAGAGAAAATAACTCACTA |
| | | TGCCAATCAACCGATAGAAAATAAAAACCCTGATAACAAGAAAAAAGAAAG |
| | | CGTTTTTGAGTATGATATTGTAAAAGACAAGAGATTTACCAAAAGGCAATTTT |
| | | CACTTCACGTGCCTATTACAATCAACTTTAAGGCACACGGTCAGGAATTTTTA |
| | | AATTATGATGTTCGCAAGGCGGTTAAATACAAAGATGATAATTATGTTATCGG |
| | | CATTGACCGAGGAGAGAGAAACCTGATTTATATAAGCGTTATTGATTCAAAC |
| | | GGTAAAATCGTTGAGCAAATGTCGCTTAATGAAATAATCAGTGATAACGGGC |
| | | ACAAAGTTGATTATCAAAAGCTTTTGGACACAAAAGAAAAGGAAAGAGATAA |
| | | AGCAAGAAAGAATTGGACCTCTGTTGAAAATATAAAGGAACTCAAAGAAGGC |
| | | TATATCAGTCAGGTTGTTCACAAAATTTGTGAATTAGTCGTCAAATATGACGC |
| | | TGTTATCGCCATGGAGGATTTGAATTTTGGCTTTAAGCGTGGCAGATTCCCTG |
| | | TTGAAAAGCAAGTTTATCAAAAATTTGAAAATATGCTTATTTCAAAACTCAAT |
| | | TTGCTTATTGATAAAAAGGCAGACCCAACAGAAAACGGCGGACTTTTAAGAG |
| | | CATATCAGCTTACGAATAAATTTGACGGTGTAAATAAGGCTAAGCAAAACGG |
| | | TATCATCTTTTATGTTCCTGCGTGGGATACAAGTAAAATAGACCCGGCAACAG |
| | | GTTTTGTTAATCTTTTGAAGCCAAAATGCAACACAAGCATGCCGGAGGCGAA |
| | | AAAACTTTTTGAAACAATTGATGATATCAAATATAATACAAACACCGATATGT |
| | | TTGAGTTCTATATTGATTACAGCAAATTCCCAAGGTGCAATTCAGACTTCAAA |
| | | AAATCTTGGACTGTTTGCACTAATTCAAGCAGGATTTTAACCTTCCCAAACAA |
| | | AGAAAAAAATAATATGTGGGACAATAAACAAATTGTTCTTACCGATGAATTT |
| | | AAGTCGTTATTTAATGAATTCGGCATTGATTATAAAGGTAATCTTAAGAGCTC |
| | | TATTTTAAGCATTTCCAATGCTGATTTTTACAGGCGATTAATAAAGCTTCTTTC |
| | | ATTAACACTTCAAATGAGAAACAGTATTACCGGCAGCACATTACCGAAAGAT |
| | | GACTATCTCATCTCCCCTGTTGCAAATAAAAACGGTGAGTTCTATGACAGTCG |
| | | TAATTATAAAGGTACAAATGCCGCTTTGCCTTGCGATGCCGATGCCAACGGTG |
| | | CATATAACATTGCAAGAAAAGCACTTTGGGCAATAAATGTATTAAAAGACAC |
| | | TCCGGACGATATGCTTAATAAAGCTAAGCTTAGTATAACTAATGCCGAATGGC |
| | | TTGAATACACGCAAAAATGA |
| 74 | 58 | ATGAAAGAACAGTTTATAAATTGCTATCCATTATCCAAAACTTTAAGATTTTC |
| | | TTTAATCCCTGTTGGAAAAACCGAAGATAATTTCAATAAAAAGCTTTTGCTTG |
| | | AAAGCGATAAACAAAGAGCGGAGAATTATGAAAATGTCAAAAGCTATATTGA |
| | | CCGCTTTCATAAAGAATATATTAAATCTGCATTAGCAAACGCAAGAATTGAAA |
| | | AAATCAATGAATATGCGGCTTTATATTGGAAAAACAATAAGGATGATTCTGA |
| | | CGCAAAAGCTATGGAATCGTTAGAAGATGATATAAGAAAGCAAATATCCAAA |
| | | CAACTTACATCAACCGCAAACTTTAAAAGACTGTTTGGAAAAGAGTTGATATG |
| | | TGAAGACTTACCGGCTTTTTTAACAGATGAAAATGAAAAAGAAACAGTTGAA |
| | | TGCTTTAGAAGCTTTACAACATATTTTAATGGTTTTAATACTAATCGAAAGAA |
| | | TATGTATTCGAGTGAAAAAAAGTCAACTGCAATAGCTTATCGTTGTGTAAATG |
| | | ACAACCTTCCTCGCTTTTTAGATAATATAAAAACCTTTCAAAAAATATTCGAT |
| | | AATCTTTCTGATGAAACTATCACAAAACTAAACACAGATTTATATAATATATT |
| | | CGGCAGAAAAATTGAAGATATTTTTTCTGTTGATTATTTTGATTTTGTTTTGAC |
| | | TCAATCAGGCATTGATATTTATAATTATATGATCGGCGGATATACTTGCTCAG |
| | | ACGGAACCAAAATCCAAGGTCTTAATGAATGTATAAATCTTTATAACCAGCA |
| | | GGTTGCCAAAAATGAAAAATCAAAAAGATTGCCGTTAATGAAACCGTTACGT |
| | | AAGCAAATCTTAAGTGAAAAGGACAGTGTATCGTTCATTCCCGAGAAATTCA |
| | | ATTCAGACAACGAAGTGTTGCTTGCGATTGAAGAATATTATAATAACCACATT |
| | | AGTGATATCGATTCGCTTACAGAGCTTTTGCAATCATTAAACACTTATAATGC |
| | | CAATGGAATATTTATAAAATCAGGTGCTGCCGTTTCCGATATTTCAAACGCTG |
| | | CATTTAACTCATGGAATGTATTACGCTTAGCTTGGAATGAAAAGTATGAAGCT |
| | | TTGCATCCCGTAACAAGCACAACAAAAATCGATAAATATATTGAAAAGCGAG |
| | | ACAAGGTATATAAATCAATAAAAAGCTTTTCGCTTTTTGAACTTCAAGAGCTT |
| | | GGTGCGGAAAATGGGAATGAAATAACCGATTGGTATATTTCATCAATCAATG |
| | | AATGTAACCGCAAAATAAAAGAAACTTATTTGCAGGCACGGGAATTGCTGGA |
| | | ATCCGATTATGAAAAGGACTACGATAAAAGACTTTATAAAAATGAAAAAGCA |
| | | ACAGAGTTAGTAAAAAACCTGCTTGACGCAATAAAGGAATTTCAACAGCTTG |
| | | TTAAACTGTTAAACGGCACAGGTAAAGAAGAAAACAAGGACGAGCTTTTTTA |
| | | CGGCAAATTCACTTCACTTTATGACTCGGTAGCAGATATTGACAGGCTTTACG |
| | | ATAAGGTTAGAAACTACATTACTCAAAGACCTTATTCCAAAGATAAAATAAA |
| | | GCTGAATTTTGACAATCCCCAACTTCTTGGCGGATGGGATAAAAACAAAGAA |
| | | AGCGATTACAGAACCGTTATTCTTCGCAAAAATGATTTTTACTATCTTGCCGTT |
| | | ATGGACAAATCACACAGTAAGGTTTTTGTTAATGCACCTGAGATAACCTCTGA |
| | | AGACGAGGATTATTACGAAAAAATGGAATATAAGCTTTTGCCCGGTCCCAAT |
| | | AAAATGTTGCCAAAGGTTTTCTTCGCCTCTAGAAATATTGACAAATTTCAACC |
| | | GTCAGACAGAATACTTGATATTCGCAAAAGAGAAAGCTTTAAAAAAGGAGCG |
| | | ACATTTAACAAATCCGAATGTCATGAGTTTATAGATTATTTTAAGGAATCTAT |
| | | TAAGAAGCATGATGATTGGTCAAAATTCGGATTTGAGTTTTCTCCTACAGAAA |
| | | GCTATAACGATATTAGCGAATTTTATCGAGAAGTTTCAGATCAAGGCTATTAT |
| | | ATTAGCTTTAGTAAAATATCAAAAAACTATATCGATAAGCTTGTAGAAAACG |
| | | GATATCTTTATCTTTTTAAAATCTATAATAAAGACTTTTCAAAGTACAGCAAA |
| | | GGAACTCCGAATTTACATACTTTGTATTTCAAAATGCTTTTTGACGAGAGAAA |
| | | TTTATCAAATGTGGTATACAAGCTCAACGGTGAAGCCGAGATGTTCTACCGTG |
| | | AAGCAAGTATAAATGACAAAGAGAAAATAACTCATCATGCCAATCAACCGAT |
| | | AAAAAACAAAAATCCTGATAACGAGAAAAAAGAAAGCGTTTTTGAGTATGAT |
| | | ATTGTAAAAGACAAAAGATTTACCAAAAGGCAATTTTCACTTCACGTGTCTGT |
| | | TACAATCAACTTCAAGGCACACGGTCAGGAATTTTTGAACTATGATGTTCGCA |
| | | AGGCGGTTAAATATAAAGATGATAATTACGTTATCGGCATTGACCGTGGCGA |
| | | AAGGAATCTGATTTATATCAGCGTTATCAATTCAAACGGTGAAATTGTTGAAC |
| | | AAATGTCGCTTAATGAAATAATCGGTGACAACGGATACAGTGTTGATTATCAA |
| | | AAGCTTTTGGATAAGAAAGAAAAGGAAAGAGATAAAGCAAGAAAAAACTGG |
| | | ACCTCTGTTGAAAATATAAAGGAACTGAAAGAAGGCTACATCAGCCAGGTTG |
| | | TTCACAAAATCTGTGAATTAGTCGTTAAATATGATGCCGTTATCGCTATGGAG |
| | | GATTTAAACTTCGGCTTCAAGCGCGGTAGGTTTCCTGTTGAAAAGCAAGTTTA |
| | | TCAAAAATTTGAAAATATGCTTATTTCCAAACTCAATTTGCTTATTGATAAGA |
| | | AGGCGGAACCGACCGAAACCGGCGGTCTTTTGCGAGCATATCAGCTTACGAA |
| | | TAAATTCGACGGCGTAAATAAGGCTAAGCAAAACGGTATCATCTTTTATGTTC |
| | | CGGCTTGGGATACAAGTAAAATAGATCCGGTAACGGGCTTTGTTAATCTTTTA |
| | | AAGCCAAAATACACAAGTGTGCGGGAAGCTAAAAAGTTATTTGAAACAATTG |
| | | ATGATATCAAATATAACACAAACACCGATATGTTTGAGTTCTGTATTGATTAT |
| | | GGTAAATTCCCGAGATGCAATTCGGATTTCAAAAAAACTTGGACTGTTTGCAC |
| | | TAATTCAAGCAGAATTTTATCCTTCCGGAATGAAAAAAAGAATAACGAGTGG |
| | | GACAATAAGCAAATTGTTCTTACCGATGAATTCAAATCGTTGTTTAATGAATT |
| | | TGGCATTGATTATACAAGTGATCTTAAGGCTTCTATTTTAAGCATTTCCAATGC |
| | | CGATTTTTACAATCGATTGATAAGACTTCTTTCATTAACACTTCAAATGAGAA |
| | | ACAGTATTATCGGCAGCACATTACCGGAAGATGACTACCTTATTTCGCCTGTT |
| | | GCAAATGACAGAGGTGAGTTCTATGACAGTCGTAATTATAAAGGCTCAAATG |
| | | CCGCTTTGCCTTGCGATGCCGATGCGAATGGCGCATATAATATTGCAAGAAAA |
| | | GCGCTTTGGGCAATAAATGTTTTAAAAGACACTCCGGATGATATGCTTCAAAA |
| | | AGCAAAACTTAGTATAACTAATGCCGAATGGCTTGAATATACACAAAGATGA |
| 75 | 59 | ATGAAAGAACAGTTTATAAATTGCTATCCATTATCCAAAACTTTACAGTTTTC |
| | | TTTAATTCCCGTCGGAAAAACGGATGATAATTTTAATAAAAAGCTGTTACTTG |
| | | AAAGGGATAAACAAAGAGCGGAGAATTACGAAAAGGTTAAAGGTTATATTG |
| | | ACCGCTTTCACAAAGAATATATTGAATCCGTACTAGTCAATGCAAGGGTTGAA |
| | | AAAATCGATGAATATGCGGATTTGTATTGGAAAAGCAACAAGGACGATTCCG |
| | | ACGCAAAGGCTATGGAATCATTAGAAAATGATATGCGAAAGCAAATATCAAA |
| | | ACAGCTTAAATCAAATGCACGCTATAAAAGGCTGTTTGGAAAAGAACTTATA |
| | | TGTGAAGATTTACCGTCTTTTTTAACGGATAAAGAAGAGAGAGAAACAGTTG |
| | | AGTGCTTCAGAAGCTTTACAACGTATTTCAAAGGCCTTAATACTAATCGAGAA |
| | | AATATGTATTCAAGTGATGAAAAATCAACTGCAATATCTTACCGTTGCATAAA |
| | | TGACAACCTGCCACGCTTTTTAGATAATGTAAAAAGTTTTCAAAAAGTATTTG |
| | | ATAATCTTTCTGATGAAACTATCACAAAGCTAAACACAGATTTATATAATACA |
| | | TTCGGCAGAAATATTGAAGATGTTTTTTCTGTTGATTATTTTGAATTTGTTTTG |
| | | GCTCAATCGGGCATTGATATTTATAATTCTATGATTGGCGGATATACTTGCTCT |
| | | GACGGAACAAAAATCCAAGGTCTTAATGAATGCATAAATCTTTATAACAAGC |
| | | AGGATGCAAAAAATGAAAAATCAAAAAGATTGCCATTGATGAAGCCGTTATA |
| | | TAAACAAATCTTGAGCGAAAAGGACAGCGTATCGTTCATTCCCGAGAAATTT |
| | | AATTCAGACAATGAAGTGTTGCTTTCGATTGAAGATTATTATAGCAGCCACAT |
| | | TGGCGATTTGGATTTGCTAACAGAGCTTTTGCAATCGTTAAACACTTATAATG |
| | | CTAATGGAATATTTGTAAAATCCGGCGCTGCCGTTTCCGATATTTCAAACGGT |
| | | GCATTTAATTCATGGAACGTATTACGTTTAGCTTGGAACGAGAAATACGAGGC |
| | | ATTGCATCCCGTAACAAGCAAAACAAACCTCGATAATTATATTGAAAAGCGA |
| | | GACAAGATATATAAAGCAATAAAAAGCTTTTCGCTTTTTGAACTTCAAAGCCT |
| | | CGGTAACGAAAACGGCAACGAAATAACAGATTGGTATATTTCCTCAAGCAAA |
| | | GAATGTAACAGCAAAATCAAAGAAGCTTATTTGCAGGCACGGGAATTGCTGA |
| | | AATCCGATTATGAAAAAAGCTACAATAAAAGACTTTCTAAAAACGGAAAAGC |
| | | AACACAGTCAATTAAAAACATCCTTGACGCAATAAAGGATTTTCACCATCTGG |
| | | TAAAGTCGTTAAACTGTACCGGTAAGGAAGAAAACAAGGATGAACTTTTTTA |
| | | CGGCAAACTCACTTCGTATTATGACTCAATAACAGATATTGACAGGCTTTACG |
| | | ATAAAGTTAGAAACTACATTACCCAAAAGCCTTATTCCAAAGATAAAATTAA |
| | | ATTAAATTTTGACAATCCTCAACTTCTCGGTGGATGGGATAAAAACAAAGAA |
| | | AGCGATTACAGAACCGTTCTTCTTCGCAAAGATGATTTTTACTATCTTGCTGTT |
| | | ATGGACAAATTGCACAGCAAAGCTTTTGTTGATGCTCCTAATATAACCTCTAA |
| | | AGACGAGGATTATTACGAAAAAATGGAATATAAGCTTTTACCCGGTCCCAAT |
| | | AAAATGTTGCCAAAGGTTTTCTTTGCCGCTAAAAACATTGACACATTCCAACC |
| | | GTCAGACAGAATACTTGACATTCGCAAAAGAGAGAGTTTCAAAAAAGGGGCA |
| | | ACATTTAATAAATCCGAATGTCATGAGTTTATAGATTATTTTAAGAACTCCAT |
| | | TGAGAAGCACTATGATTGGTCGCAATTCGGCTTTGAGTTTACTCCTACCGAAA |
| | | ACTATAACGATATCAGCGAGTTTTATCGAGAAATTTCGGATCAGGGTTATTCT |
| | | GTAAGCTTTAATAAAATATCAAAAAGCTATGTTGATGAACTTGTAGACAACG |
| | | GATATATCTATCTTTTCCAAATCTACAATAAAGACTTTTCAAAGTACAGCAAA |
| | | GGAACTCCGAATTTACATACTCTGTATTTCAAAATGCTTTTTGATGAGAGAAA |
| | | CTTATCAAATGTAGTATACAAGCTCAACGGTGAAGCCGAGATGTTTTACCGTG |
| | | AAGCAAGTATAAATGACAAGGAAAAAATAACTCATCAAGCCAATCAACCGAT |
| | | AGAAAACAAAAATCCTGATAACGAGAAAAAAGAAAGCACTTTTGAGTATGAC |
| | | ATTATTAAAGATAAAAGATTTACCAAAAGGCAATTTTCGCTTCACGTGCCTAT |
| | | TACAATCAACTTTAAGGCACACGGTCAGGAATTTTTGAATTATGATGTTCGCA |
| | | AGGCGGTTAAATATAAAGATGATAATTATGTCATCGGCATTGACCGAGGCGA |
| | | AAGAAATCTGATTTATATCAGCGTTATTGATTCAAACGGTAAAATCGTTGAGC |
| | | AAATGTCGCTTAATGAAATAATCAGTGATAACGGACACAGAGTTGATTATCA |
| | | AAAGCTTTTGGACACAAAAGAAAAGGAAAGAGATAAAGCAAGAAAAAATTG |
| | | GACTTCTGTTGAAAATATAAAGGAACTCAAAGAAGGCTATATCAGTCAAGTT |
| | | GTTCACAAAATTTGTGAATTAGTCGTCAAATATGACGCTGTTATTGCCATGGA |
| | | GGATTTGAACTTTGGCTTTAAGCGTGGCAGATTCCCTGTTGAAAAGCAAGTTT |
| | | ATCAAAAATTCGAAAATATGCTTATTTCAAAACTCAATTTGCTTATTGATAAA |
| | | AAGGCAGACCCAACAGAAGACGGCGGGCTTTTAAGAGCATATCAGCTTACGA |
| | | ATAAATTTGACGGCGTAAATAAAGCCAAGCAAAACGGCATCATCTTTTATGTT |
| | | CCGGCTTGGGACACAAGCAAAATAGACCCGGTAACAGGTTTTGTTAATCTTTT |
| | | GAAGCCAAAATACACAAGCGTATCGGAAGCAAAAAAGTTATTTGAAACAATT |
| | | GATGACATTAAATATAATGCAAATACCGATATGTTTGAATTTTGTATTGATTA |
| | | CGGTAAGTTCCCAAGATGCAATTCAGACTACAAAAATACTTGGACTGTTTGCA |
| | | CTAATTCAAGCAGGATTTTAACTTGCAGAAACAAAGAAAAGAATAATATGTG |
| | | GGACAATAAGCAAATTGTTCTTACCGATGAATTCAAATCGTTGTTCGGCGAAT |
| | | TCGGCATTGATTATAAAGGTAATCTTAAAACTTCAATTTTAAGCATTTCCAAT |
| | | GCTGACTTTTACAGGCGATTGATAAAGCTTCTTTCATTAACGCTTCAAATGAG |
| | | AAACAGCATTACCGGCAGCACATTGCCGGAGGATGACTACCTCATTTCCCCTG |
| | | TTGCAAATGACAGAGGCGAATTCTATGACAGCCGTAATTATAAAGGAATGAA |
| | | TGCCGCATTACCTTGCGATGCCGATGCAAACGGCGCATATAATATTGCGAGAA |
| | | AAGCACTTTGGGCAATAAATGTTTTAAAAAGCACTCCGGATGATATGCTTAAT |
| | | AAAGCAAATCTCAGTATAACTAATGCCGAATGGCTTGAATACACGCAAAAAT |
| | | GA |

### Group 6 Sequences (SEQ ID Nos: 76-99)

TABLE S6A
Enzyme Sequences Group 6

| SEQ | |
|---|---|
| ID NO | Sequence |
| 76 | MKNNNMLNFTNKYQLSKTLRFELKPIGKTKENIIAKNILKKDEERAESYQLMKKTIDGFHK |
| | HFIELAMQEVQKTKLSELEEFAELYNKSAEEKKKDDKFDDKFKKVQEALRKEIVKGFNSEK |
| | VKYYYSNIDKKILFTELLKNWIPNEKMITELSEWNAKTKEEKEHLVYLDKEFENFTTYFGGF |
| | HKNRENMYTDKEQSTAIAYRLIHENLPKFLDNINIYKKVKEIPVLREECKVLYKEIEEYLNV |
| | NSIDEVFELSYFNKTLTQKDIDVYNLIIGGRTLEEGKKKIQGLNEYINLYNQKQEKKNRIPKL |
| | KILYKQILSDRDSISWLPESFEDDNEKTASQKVLEAINLYYRDNLLCFQPKDKKDTENVLEE |
| | TKKLLAGLSTSDLSKIYIRNDRAITEISQSLFKDYGVIKDAIKFQFIQSLTIGKSGLSKKQEEAV |
| | EKHLKQKYFSIAEIENALFTYQNETDALKELKENSHPVVDYFINHFKAKKKEETDKDFDLIA |
| | NIEAKYSCIKGLLNTPYPEDKKLYQRSKEDNDIDNIKAFLDALMELLHFVKPLALSNDSTLE |
| | KDQNFYSHFEPYYEQLELLIPLYNKVRNFAAKKPYSTEKFKLNFENSHFLSGWATEYSTKG |
| | GLIIKKENDFYLLIVDKKLQKEDVDLLKRNVSSNIAYRVVYDFQKPDNKNVPRLFIRSKGTN |
| | FAPAVEKYNLPIHNVIEIYDNGFFKTEYRKVDPVKFKKSLVKLIDYFKEGFTKHDSYKHYDF |
| | GWKESNQYEDISEFYNDVVNSCYQLVDEEINYDNLLKLVDEGKLYLFQIYNKDFSPYSKGK |
| | PNMHTLYWKALFDPENLKDVVYKLNGQAEVFYRKKSIEQKNIVTHKANEPIDNKNPKAKK |
| | KQSTFEYDLIKDKRYTVDKFQFHVPITLNFKATGNDYINQDVLTYLKNNPEVNIIGLDRGER |
| | HLIYLTLINQKGEILLQESLNTIVNKKYDIETPYHTLLQNKEDERAKARENWGVIENIKELKE |
| | GYISQVVHKIAKLMVEYNAIVVMEDLNTGFKRGRFKVEKQVYQKLEKMLIDKLNYLVFKD |
| | KDPSEVGGLYHALQLTNKFESFSKIGKQSGFLFYVPAWNTSKIDPTTGFVNLFNTKYESVPK |
| | AQEFFKKFKSIKFNSAENYFEFAFDYNDFTTRAEGTKTEWTVCTYGDRIKTFRNPDKVNQW |
| | DNQEVNLTEQFEDFFGKNNLIYGDGNCIKNQIILHDKKEFFEGLLHLLKLTLQMRNSITNSEV |
| | DYLISPVKNNKGEFYDSRKADNTLPKDADANGAYHIAKKGLVLLNRLKENEVEEFEKSKK |
| | VKDGKSQWLPNKDWLDFVQRNVEDMVVV |
| 77 | MTMKNFSNLYQVSKTIRFELKPIGSTLENIENKSLLKNDSIRAESYQKMKETIDEFHKYFIDL |
| | ALNNKKLSYLNEYIALYTQSAEAKKEDKFKAEFKKVQDNLRKEIVSSFTEGEAKAIFSVLDK |
| | KELITIELEKWKNENNLAVYLDESFKSFTTYFTGFHQNRKNMYSAEANSTAIAYRLIHENLP |
| | KFIENSKAFEKSSQIAELQPKIEKLYKEFEAYLNVNSISELFEIDYFNEVLTQKGITVYNNIIGG |
| | RTATEGKQKIQGLNEIINLYNQTKPKNERLPKLKQLYKQILSDRISLSFLPDAFTEGKQVLKA |
| | VFEFYKINLLSYKQDGVEESQNLLELIQQVVKNLGNQDVNKIYLKNDTSLTTIAQQLFGDFS |
| | VFSAALQYRYETVVNPKYTAEYQKANEAKQEKLDKEKNKFVKQDYFSIAFLQEVVADYV |
| | KTLDENLDWKQKYTPSCIADYFTTHFIAKKENEADKTFNFIANIKAKYQCIQGILEQADDYE |
| | DELKQDQKLIDNIKFFLDAILEVVHFVKPLHLKSESITEKDNAFYDVFENYYEALNVVTSLY |
| | NMVRNYVTQKPYSTEKIKLNFENAQLLNGWDANKEKDYLTTILKRDGSYFLAIMDKKHNK |
| | TFQQLTEDDENYEKMVYKLLPGVNKMLPKVFFSNKNIAFFNPSREILDNYKNNTHKKGATF |
| | NLKDCHALIDFFKDSLNKHEDWKYFDFQFSETKTYQDLSGFYREVEHQGYKINFKKVSVSQ |
| | IDTLIEEGKMYLFQIYNKDFSPYAKGKPNMHTLYWKALFETQNLENVIYKLNGQAEIFFRKA |
| | SIKKKNIITHKAHQPIAAKNPLTPTAKNTFAYDLIKDKRYTVDKFQFHVPITMNFKATGNSYI |
| | NQDVLAYLKDNPEVNIIGLDRGERHLVYLTLIDQKGTILLQESLNVIQDEKKATPYHTLLDN |
| | KEIARDKARKNWGSIESIKELKEGYISQVVHKITKMMIEHNAIVVMEDLNFGFKRGRFKVEK |
| | QIYQKLEKMLIDKLNYLVLKDKQPHELGGLYNALQLTNKFESFQKMGKQSGFLFYVPAWN |
| | TSKIDPTTGFVNYFYTKYENVEKAKTFFSKFESILYNKTKGYFEFVVKNYSDFNPKAADTRQ |
| | EWTICTHGERIETKRQKEQNNNFVSTTIQLTEQFVTFFEKVGLDLSKELKTQLIAQNEKSFFE |
| | ELYHLLKLTLQMRNSESHTEIDYLISPVANEKGIFYDSRKATASLPIDADANGAYHIAKKGL |
| | WIMEQINKTNSADDLKKVKLAISNREWLQYVQQVQKK |
| 78 | LIIILNLFKMTALLQNFTNQYQLSKTLRFELIPQGKTFDFIQEKGLLNQDKRRAESYQEMKKT |
| | IDKFHKYFIDLALSNVKLTHLDAYLELYNTSAETKKESKFKDDLKKVQDNLRKEIVKSFSEG |
| | EAKSIFAILDKKELITVELEKWFESNEQEEIYFDDKFKTFTTYFTGFHQNRKNMYSVEANSTA |
| | IAYRLIHENLPKFLENAKAFEKIKQVPELQPKIAKIYKEFESYLNVNSIDELFELDYFNDVLTQ |
| | MGIDVYNNIIGGRTESDGKSKIQGLNEIINLYNQTKEKNQRLPKLKQLYKQILSDRISLSFLPD |
| | AFTDGKQVLKAIFDFYKINLLSYTIEGQEESQNLLLLISQIVENLSGFDNQKMYLRNDTHLTT |
| | ISQQLFGDFSVFSTALNYWYETKVNPKFEAEYSKANEKKREALDKTKANFTKQDYFSIAFL |
| | QEVLANYVLTLDKTSDVVQKFTPTCVADYFNNHFVAKKENETDKTFDLIANITAKYQCIQG |
| | ILENADRYEDELKQDQKLIDDLKFFLDAIMELLHFIKPLHLKSESITEKDTAFYDVFENYYEA |
| | LSLLTPLYNMVRNYVTQKPYSTEKIKLNFENAQLLNGWDANKEADYLTTILKKDGNYFLAI |
| | MDKKHNKAFQKFPEGTDNYEKMVYKLLPGVNKMLPKVFFSNKNIAYFNPSKELLENYKKE |
| | THKKGDTFNLEHCHALIDFFKDSLNKHEDWKHFDFQFSETKSYQDLSGFYREVEHQGYKIN |
| | FKNIDSEYIDGLVNEGKLYLFQIYNKDFSPYSKGKPNMHTLYWKALFEEQNLQNVIYKLNG |
| | QAEIFFRKASIKPKNIITHKANQPIKAKNPLTPEAKNTFEYDLIKDKRFTVDKFQFHVPITMNF |
| | KATGGSYINQTVLEYLQNNPEVKIIGLDRGERHLVYLTLIDQQGNILKQESLNTISDTKIATP |
| | YHKLLDNKEKERDLARKNWGTVENIKELKEGYISQVVHKIATMMVEENAIVVMEDLNFGF |
| | KRGRFKVEKQIYQKLEKMLIDKLNYLVLKNKQPHELGGLYNALQLTNKFESFQKMGKQSG |
| | FLFYVPAWNTSKIDPTTGFVNYFYTKYENVEKAKAFFDKFQSIRFNTRANYFEFEVKKYSDF |
| | NPKAEDTKQEWMICTFGERIETKRQKDQNNNFVSTTINLTEKTEDFFGKNNIVYGDGNCIKK |
| | QIAAKEDKDFFETLLYWFKMTLQMRNSVTGTDEDYLISPVMNADGIFYDSRKADNNLPKD |
| | ADANGAYHIAKKGLWILEQINKPKTTEELKKIKLAISNKEWLQYVQE |
| 79 | MNTTYTNLFALSKTLRFELIPQGKTLHFIQEKGLITNDNKRAESYQKMKKTIDEFHKYFIDLA |
| | LKNVRLSFLEDYLDLYNQSADYKKEPKFKEELKKVQDNLRKEIVLSFSKDEAKTIFSILDKK |
| | ELITEELEKWFENQEKKDLHFDDKFKTFTTYFTGFHQNRKNMYSSEPNSTAIAYRLIHENLP |
| | KFLENAKAFERIKQVPELQLKIEKIYKDFELYLNVNSIEELFELNYFNDVLTQMGIDVYNNII |
| | GGRTETDGKPKIQGLNEIINLYNQTKSKNERLPKLKQLYKQILSDRVSLSFLPDAFTDGKQV |
| | LQAIFAFYKVNILSYTIDGQAESKNLLELIQQLLANISSFETERIHLKNDTNLTTISQQLFGDFS |
| | VFSTALNYWYETKVYPKFEAEYTKATEKKRETLEKTKAVFTKQDYFSIAFLQEIITEYSLSL |
| | DKDSELITKITPTCVADYFKNHFVAKKENETDKTFGFLANITAKYQCIQGTLENATNYNEEL |
| | KQDQKLIDDIKLFLDTLLELLHFIKPLHLKSDSITEKDNAFYDLFENYYEALSLLTPLYNMVR |
| | NYVTQKPYSTEKIKLNFENAQLLNGWDVNKEADYLTTILKKEGNYFLAIMDKKHNKAFQK |
| | FPEGENNYEKMTYKLLPGVNKMLPKVFFSNKNIAYFNPSKELVENYKNETHKKGEKFNLL |
| | HCRQLIDFFKDSINKHEDWKHFDFQFSETKSYQDLSGFYREVEHQGYKINFKNIDSAYIDSL |
| | VNEGKLFLFQIYNKDFSPFSKGKPNMHTLYWKALFEDQNLKNVKYKLNGQAEIFFRKASIK |
| | PENIITHKANQSIKAKNPLTPDAKNTFDYDLIKDKRYTVDKFQFHVPITLNFKATGGSFINQN |
| | VLEYLKENPEVKIIGLDRGERHLVYLTLIDQQGNILKQESLNTITDAKIATPYHQLLDIKEKE |
| | RDFARKNWGTVENIKELKEGYISQVVHKIATMMVEENAIVVMEDLNFGFKRGRFKVEKQI |
| | YQKLEKMLIDKLNYLVLKDKQPTELGGLYNALQLTNKFESFQKMGKQSGFLFYVPAWNTS |
| | KIDPTTGFVNYFFTKYENVDKAKVFFDKFQSIRYNTKANYFEFEVKKYSDFNPKAEGTLQE |
| | WTVCSYGERIETKRLKDQNNNFVSTPINLTEKIEDFLGRNNIVYGDGTCIKSQIAEKNAKEFF |
| | EGLLYWFKMTLQMRNSATGTDEDYLISPVMNAQGEFYDSRKADETLPKDADANGAYHIA |
| | KKGLMWLEQIKSFDGNDWKKLELDKSNRGWLQYIQQRK |

TABLE S6B
Human Codon Optimized Nucleotide Sequences Group 6

| SEQ | Corres- | |
|---|---|---|
| ID | ponding | |
| NO | AA | Sequence |
| 80 | 76 | ATGAAGAACAACAACATGCTCAACTTCACTAACAAGTACCAGTTATCAAAAACC |
| | | TTACGATTCGAGCTGAAGCCAATCGGAAAGACTAAGGAGAATATCATTGCGAA |
| | | GAATATCCTTAAGAAGGATGAGGAAAGGGCTGAGTCCTATCAACTCATGAAGA |
| | | AAACCATTGATGGCTTTCATAAACATTTCATTGAGCTGGCTATGCAAGAGGTAC |
| | | AAAAAACTAAACTGTCTGAGCTGGAAGAGTTCGCTGAACTGTACAACAAGTCA |
| | | GCAGAGGAAAAGAAAAAGGATGACAAGTTTGACGATAAGTTTAAGAAAGTTCA |
| | | GGAAGCCCTGCGAAAGGAGATTGTTAAAGGCTTCAATTCAGAGAAGGTCAAGT |
| | | ATTACTACAGCAACATCGATAAAAAGATCCTTTTTACCGAACTCCTTAAAAACT |
| | | GGATCCCAAACGAGAAAATGATCACTGAGCTCTCTGAATGGAACGCTAAAACT |
| | | AAAGAAGAGAAAGAGCACCTCGTCTACCTTGACAAGGAATTCGAGAACTTTAC |
| | | TACATACTTTGGAGGGTTTCATAAGAATCGTGAAAACATGTATACCGATAAAGA |
| | | ACAGTCCACCGCTATTGCCTACCGCCTGATACACGAGAATTTGCCAAAGTTCCT |
| | | CGACAATATCAACATTTACAAGAAGGTCAAAGAGATCCCGGTCCTGAGGGAAG |
| | | AGTGTAAAGTTCTTTACAAAGAGATTGAGGAGTACTTAAACGTGAATTCCATCG |
| | | ACGAGGTCTTCGAGTTGTCATATTTCAATAAAACACTCACTCAGAAGGACATCG |
| | | ATGTGTACAACTTAATTATTGGCGGCAGAACACTGGAAGAAGGCAAGAAAAAG |
| | | ATACAAGGGCTCAACGAGTATATTAATCTATACAACCAGAAGCAGGAGAAAAA |
| | | GAACAGAATACCTAAGCTGAAGATCCTTTACAAGCAGATACTGAGCGATCGAG |
| | | ATAGTATAAGTTGGCTGCCTGAGAGCTTCGAGGATGATAATGAGAAGACTGCCA |
| | | GCCAGAAAGTGCTTGAGGCCATCAATCTCTATTACAGAGATAACCTCTTATGTT |
| | | TTCAGCCTAAGGACAAAAAGGACACCGAGAACGTCCTCGAGGAAACAAAAAAA |
| | | CTGCTGGCTGGGTTGAGCACGAGTGATCTGTCTAAGATTTACATCCGCAACGAC |
| | | AGAGCTATCACTGAGATTTCGCAGAGTCTGTTTAAAGACTATGGCGTAATCAAG |
| | | GATGCAATCAAGTTCCAGTTTATACAGAGTCTGACAATTGGGAAGTCAGGGCTA |
| | | TCCAAAAAACAGGAGGAGGCTGTGGAAAAACATCTGAAACAGAAATACTTCTC |
| | | CATTGCGGAAATCGAGAACGCACTTTTTACCTACCAGAACGAAACAGATGCACT |
| | | CAAAGAGTTGAAAGAAAATTCTCACCCAGTGGTGGACTATTTCATCAACCACTT |
| | | TAAAGCTAAGAAGAAGGAGGAGACAGACAAGGATTTTGACCTTATAGCGAATA |
| | | TTGAGGCAAAGTATTCCTGCATTAAGGGACTTTTAAATACCCCCTATCCCGAGG |
| | | ACAAGAAACTGTATCAAAGGTCTAAAGAGGACAACGATATCGACAATATCAAA |
| | | GCCTTTCTGGACGCCTTGATGGAGCTGCTGCACTTTGTGAAGCCTCTAGCCCTCA |
| | | GCAATGACAGTACGTTGGAAAAAGACCAGAATTTCTACTCTCACTTCGAGCCAT |
| | | ATTACGAACAGCTGGAGTTGTTGATCCCCTTGTATAATAAGGTCCGGAACTTTG |
| | | CTGCAAAAAAGCCCTACTCTACGGAGAAATTCAAGCTGAACTTCGAAAATTCCC |
| | | ACTTTCTATCGGGTTGGGCCACAGAATACTCCACCAAAGGAGGCCTCATCATTA |
| | | AAAAGGAGAACGATTTCTACCTGCTTATTGTGGACAAGAAGCTTCAAAAAGAA |
| | | GATGTCGATCTGCTGAAACGGAATGTTTCTTCGAACATTGCTTATAGAGTCGTCT |
| | | ACGATTTTCAAAAGCCAGACAATAAGAACGTGCCACGCTTATTCATCCGCTCAA |
| | | AAGGAACCAATTTCGCTCCCGCAGTAGAAAAGTATAACCTGCCCATACATAACG |
| | | TGATCGAAATTTATGACAACGGATTCTTTAAGACAGAGTACCGCAAAGTAGATC |
| | | CGGTGAAATTCAAGAAATCACTGGTTAAACTGATCGACTATTTTAAGGAGGGGT |
| | | TCACAAAACATGACTCCTACAAACATTATGACTTTGGATGGAAAGAATCAAACC |
| | | AGTACGAGGACATCAGTGAATTTTACAACGATGTTGTGAACAGCTGCTACCAGC |
| | | TAGTAGATGAAGAGATCAACTATGACAATCTGCTGAAACTAGTTGATGAAGGC |
| | | AAACTTTACCTCTTTCAGATCTACAACAAGGATTTTTCCCCGTATAGTAAGGGTA |
| | | AACCTAATATGCACACCCTGTATTGGAAAGCACTTTTTGACCCCGAGAACCTCA |
| | | AAGATGTAGTCTATAAACTGAACGGGCAGGCGGAGGTCTTCTATCGAAAGAAG |
| | | TCAATCGAGCAAAAGAACATCGTGACACATAAGGCCAACGAACCTATTGACAA |
| | | TAAGAATCCTAAGGCCAAAAAGAAGCAGTCCACCTTCGAGTATGACCTGATTAA |
| | | GGATAAACGGTATACTGTGGACAAGTTTCAGTTCCACGTCCCTATTACCTTAAA |
| | | CTTCAAAGCGACCGGTAACGACTATATAAATCAAGACGTCCTTACCTACCTGAA |
| | | GAATAATCCCGAGGTGAATATCATTGGCCTGGACAGAGGCGAACGTCACCTCAT |
| | | ATATCTCACCCTGATAAACCAGAAGGGGGAGATACTCCTGCAGGAGAGCTTGA |
| | | ACACCATAGTGAATAAGAAATACGACATCGAAACCCCCTACCACACACTGCTAC |
| | | AGAACAAGGAGGATGAACGTGCCAAAGCCAGGGAAAATTGGGGCGTCATTGAA |
| | | AATATTAAGGAACTGAAGGAGGGATATATTAGCCAAGTGGTGCATAAAATTGC |
| | | CAAACTTATGGTGGAATACAACGCCATAGTAGTGATGGAAGACCTGAACACAG |
| | | GGTTCAAGAGGGGGCGGTTTAAAGTGGAGAAGCAGGTCTATCAGAAACTCGAG |
| | | AAGATGCTGATTGACAAGTTGAATTACTTAGTGTTCAAGGACAAAGACCCATCT |
| | | GAGGTTGGCGGTCTATATCACGCGCTCCAATTGACTAACAAATTTGAGTCTTTC |
| | | AGCAAGATCGGCAAGCAGTCTGGATTCCTCTTCTACGTGCCAGCATGGAATACC |
| | | AGCAAGATCGACCCTACTACAGGGTTCGTTAATCTGTTCAACACGAAGTACGAA |
| | | TCCGTCCCAAAGGCACAGGAGTTCTTCAAGAAGTTCAAGTCCATCAAGTTTAAC |
| | | AGCGCCGAAAATTATTTCGAATTCGCCTTCGATTACAATGACTTTACTACGAGG |
| | | GCCGAAGGAACGAAAACAGAATGGACCGTGTGCACCTATGGCGATAGGATTAA |
| | | GACTTTTCGGAATCCCGATAAGGTAAATCAATGGGATAATCAAGAGGTTAATCT |
| | | GACCGAACAGTTTGAGGACTTCTTTGGTAAAAACAACCTGATTTACGGTGATGG |
| | | TAACTGTATCAAAAACCAGATCATCTTGCACGATAAGAAGGAATTTTTTGAAGG |
| | | ACTCCTACACCTGTTGAAACTGACACTCCAGATGAGAAACAGTATCACAAATTC |
| | | TGAGGTGGATTACCTCATAAGCCCTGTGAAAAATAATAAAGGCGAATTCTACGA |
| | | CTCCCGGAAAGCTGATAATACTTTGCCCAAGGATGCCGATGCCAATGGCGCATA |
| | | TCATATCGCCAAAAAGGGACTGGTGTTGCTTAATCGCCTGAAAGAGAATGAAGT |
| | | TGAAGAGTTCGAGAAGAGCAAGAAGGTTAAGGACGGGAAGAGCCAGTGGCTGC |
| | | CGAATAAGGACTGGTTAGACTTTGTGCAGCGGAATGTGGAAGATATGGTGGTG |
| | | GTGTGA |
| 81 | 77 | ATGACAATGAAGAACTTTAGCAACCTGTACCAGGTGAGCAAAACCATTAGGTTT |
| | | GAGCTGAAGCCAATCGGAAGCACACTGGAGAACATCGAAAACAAGTCACTGCT |
| | | GAAAAATGATAGCATTAGAGCCGAGAGCTACCAGAAGATGAAAGAGACAATTG |
| | | ACGAGTTCCACAAGTATTTCATCGATCTGGCTCTGAACAATAAGAAGCTGAGCT |
| | | ACCTGAACGAGTATATCGCTCTCTACACCCAGAGCGCCGAAGCCAAGAAGGAG |
| | | GACAAATTTAAGGCCGAATTTAAGAAGGTGCAGGATAACCTGCGGAAAGAAAT |
| | | TGTGAGCTCCTTCACCGAGGGTGAGGCTAAGGCCATCTTCAGCGTGCTGGACAA |
| | | AAAGGAGCTGATTACAATTGAACTGGAAAAATGGAAGAACGAGAACAACCTGG |
| | | CCGTGTACCTCGACGAGAGCTTCAAGTCCTTCACTACATACTTCACAGGCTTCCA |
| | | CCAGAATAGAAAGAACATGTACAGCGCAGAGGCCAACTCTACAGCCATCGCCT |
| | | ACCGGCTGATCCATGAGAACCTGCCCAAGTTTATCGAGAACTCCAAGGCCTTTG |
| | | AGAAGTCCAGCCAGATCGCCGAGCTGCAGCCAAAGATCGAAAAGCTGTACAAG |
| | | GAGTTCGAGGCCTATCTGAACGTGAATAGCATCAGCGAGCTGTTCGAAATTGAC |
| | | TACTTCAACGAGGTGCTGACCCAGAAGGGCATTACAGTGTACAACAACATCATC |
| | | GGGGGCAGGACTGCCACCGAGGGGAAACAGAAGATTCAGGGCCTGAATGAGAT |
| | | TATCAATCTGTATAATCAGACAAAACCCAAGAACGAAAGACTGCCAAAGCTGA |
| | | AGCAGCTGTATAAGCAGATCCTGTCCGACAGAATCAGCCTGTCTTTCCTGCCTG |
| | | ACGCCTTCACCGAAGGGAAGCAGGTGTTGAAAGCCGTGTTTGAGTTCTACAAGA |
| | | TCAACCTTCTGTCTTACAAACAGGATGGCGTGGAGGAAAGCCAGAACCTGCTGG |
| | | AGCTGATCCAGCAGGTGGTGAAGAACCTGGGCAACCAGGACGTGAATAAGATC |
| | | TACCTGAAAAACGACACCTCCCTGACTACCATTGCCCAGCAGCTCTTTGGGGAC |
| | | TTTAGTGTGTTTAGCGCCGCCCTGCAATACAGGTATGAGACCGTGGTGAACCCC |
| | | AAGTACACTGCCGAATATCAGAAGGCCAACGAGGCCAAGCAGGAGAAGCTCGA |
| | | CAAGGAGAAGAACAAGTTCGTGAAACAGGACTACTTCTCCATCGCCTTCCTGCA |
| | | GGAGGTGGTGGCAGATTACGTGAAGACCCTGGACGAAAACCTGGATTGGAAAC |
| | | AGAAGTACACCCCATCCTGCATCGCCGACTACTTTACCACCCACTTCATCGCCA |
| | | AGAAAGAGAACGAGGCCGATAAAACCTTTAACTTTATTGCCAATATTAAGGCCA |
| | | AGTATCAGTGCATCCAGGGCATTCTGGAGCAGGCCGATGATTACGAGGATGAG |
| | | CTGAAGCAGGACCAGAAGCTGATCGATAACATCAAGTTTTTCCTGGACGCTATA |
| | | CTGGAGGTGGTGCACTTCGTGAAGCCTCTGCACCTGAAGTCTGAGTCTATCACT |
| | | GAGAAGGATAATGCCTTTTACGACGTGTTTGAGAATTACTACGAGGCACTGAAT |
| | | GTGGTGACCTCACTGTACAATATGGTGAGAAATTACGTGACTCAGAAGCCTTAC |
| | | AGCACAGAGAAGATTAAGCTGAACTTTGAAAACGCCCAGCTGCTGAACGGCTG |
| | | GGACGCTAATAAGGAGAAGGATTACTTGACCACTATTCTGAAGCGGGATGGAA |
| | | GTTATTTCCTGGCTATTATGGATAAAAAGCACAATAAGACCTTCCAGCAGCTGA |
| | | CAGAGGACGACGAGAACTACGAGAAGATGGTCTATAAGCTGCTGCCCGGCGTG |
| | | AACAAGATGCTGCCCAAGGTGTTTTTCTCTAATAAAAACATCGCCTTCTTTAACC |
| | | CCAGCAGAGAGATCCTGGACAATTATAAGAACAACACCCACAAGAAGGGCGCC |
| | | ACATTTAACCTGAAAGACTGTCATGCCCTGATTGACTTCTTCAAGGACTCCCTGA |
| | | ACAAGCACGAGGACTGGAAGTACTTCGACTTCCAGTTCTCTGAGACAAAGACCT |
| | | ACCAGGACCTGTCCGGCTTTTACCGCGAAGTGGAACACCAGGGCTACAAAATCA |
| | | ATTTTAAAAAGGTGAGCGTGTCCCAGATCGACACCTTGATCGAAGAGGGAAAA |
| | | ATGTATCTGTTCCAGATCTACAACAAGGACTTCAGTCCTTACGCAAAGGGCAAA |
| | | CCAAACATGCACACACTGTACTGGAAGGCACTGTTTGAAACCCAGAACCTGGA |
| | | GAACGTGATCTACAAGCTGAACGGCCAGGCCGAGATCTTTTTTCGCAAGGCCTC |
| | | CATCAAGAAGAAGAACATCATTACCCACAAAGCACATCAGCCCATCGCCGCCA |
| | | AGAATCCACTGACCCCAACCGCCAAGAACACCTTCGCCTACGACCTGATCAAGG |
| | | ACAAGAGATATACAGTGGACAAGTTTCAGTTTCATGTGCCCATCACCATGAACT |
| | | TCAAGGCCACTGGCAATAGCTACATTAACCAGGACGTGCTCGCCTATCTGAAGG |
| | | ATAATCCTGAAGTGAATATCATTGGCCTGGATAGGGGCGAGCGCCACCTTGTGT |
| | | ATCTGACCCTGATCGACCAGAAAGGAACCATCCTGCTGCAGGAAAGCCTGAAC |
| | | GTGATTCAGGACGAGAAAAAAGCCACACCCTACCACACCCTGCTGGACAACAA |
| | | GGAGATTGCCAGGGACAAGGCCCGCAAGAACTGGGGGTCCATCGAGTCCATTA |
| | | AGGAACTCAAGGAGGGGTACATCTCACAGGTGGTGCATAAAATTACCAAAATG |
| | | ATGATTGAGCACAACGCCATCGTGGTGATGGAGGACCTGAATTTCGGCTTCAAA |
| | | CGCGGAAGGTTTAAGGTGGAGAAGCAGATTTATCAGAAGCTGGAGAAAATGCT |
| | | GATCGACAAGCTGAACTACCTGGTGCTGAAGGACAAGCAGCCCCACGAGCTGG |
| | | GAGGGCTCTATAACGCTCTGCAGCTGACCAACAAGTTCGAGTCATTCCAGAAAA |
| | | TGGGAAAACAGAGCGGCTTCCTGTTCTATGTGCCCGCCTGGAACACCAGCAAGA |
| | | TCGACCCTACCACCGGTTTCGTGAACTATTTTTACACTAAATACGAGAATGTTGA |
| | | GAAGGCTAAGACGTTTTTCTCTAAATTCGAGAGCATTCTGTATAATAAGACAAA |
| | | GGGATATTTTGAGTTTGTGGTGAAGAATTATTCCGACTTCAACCCCAAGGCAGC |
| | | TGACACCAGACAGGAGTGGACCATTTGCACCCACGGGGAAAGAATCGAAACCA |
| | | AAAGACAGAAGGAACAGAACAATAATTTCGTGAGCACTACAATCCAGCTGACC |
| | | GAGCAGTTCGTCACTTTTTTCGAGAAGGTGGGACTGGACCTCAGCAAAGAGCTG |
| | | AAGACCCAGCTGATTGCCCAAAATGAGAAGAGCTTTTTTGAGGAGCTGTATCAC |
| | | CTGCTGAAACTGACCCTGCAGATGAGAAACAGCGAGTCTCACACTGAGATTGAT |
| | | TACCTGATCTCCCCCGTGGCTAACGAGAAAGGAATTTTTTACGACTCCCGGAAG |
| | | GCCACCGCCTCGCTGCCCATCGACGCTGACGCCAACGGGGCTTACCACATCGCT |
| | | AAGAAGGGCCTGTGGATCATGGAGCAAATTAACAAAACCAACTCCGCTGACGA |
| | | TCTGAAAAAGGTCAAGCTGGCAATCTCCAACAGAGAGTGGCTGCAGTACGTGC |
| | | AACAGGTGCAGAAAAAGTGA |
| 82 | 78 | CTGATTATTATCTTGAACCTGTTCAAGATGACAGCCCTGCTGCAGAACTTCACCA |
| | | ACCAGTATCAGCTCTCCAAGACCCTGAGGTTCGAGCTGATCCCCCAGGGCAAGA |
| | | CTTTTGATTTTATCCAGGAGAAGGGCCTGCTGAACCAGGACAAACGCAGAGCCG |
| | | AGAGCTACCAGGAGATGAAAAAGACCATCGACAAATTTCACAAATACTTCATC |
| | | GACCTGGCTCTCTCCAACGTGAAACTGACCCACCTGGATGCTTACCTGGAGCTC |
| | | TACAATACCTCCGCCGAGACCAAAAAGGAGAGCAAGTTCAAGGACGACCTGAA |
| | | GAAAGTGCAGGATAACCTGAGGAAGGAAATCGTGAAAAGTTTCAGCGAGGGGG |
| | | AGGCCAAGTCTATCTTTGCCATCCTGGACAAAAAGGAGCTGATCACTGTGGAGC |
| | | TGGAGAAGTGGTTTGAGAGCAATGAGCAGGAGGAAATCTATTTTGACGATAAA |
| | | TTCAAAACGTTTACCACCTACTTTACCGGCTTTCACCAGAACAGAAAGAACATG |
| | | TATTCTGTGGAAGCCAACTCCACCGCCATAGCCTACAGACTGATCCACGAGAAT |
| | | CTGCCTAAATTCCTGGAAAATGCTAAGGCATTCGAGAAAATTAAACAGGTCCCA |
| | | GAGCTGCAGCCTAAGATAGCTAAGATTTACAAGGAGTTTGAATCCTACCTGAAT |
| | | GTGAATTCTATCGACGAGCTGTTTGAGCTGGACTACTTCAATGACGTGCTGACA |
| | | CAGATGGGCATCGACGTGTACAACAATATCATCGGCGGCAGAACCGAGAGCGA |
| | | CGGCAAGAGCAAGATCCAAGGCCTGAATGAGATCATCAATCTGTATAATCAGA |
| | | CAAAAGAGAAGAATCAGAGACTGCCAAAACTGAAGCAGCTGTACAAACAGATT |
| | | CTGTCTGACCGTATCTCTCTGTCCTTCCTGCCAGATGCCTTCACTGACGGCAAGC |
| | | AGGTGCTGAAGGCCATCTTCGACTTTTACAAGATCAACCTGCTGAGTTACACAA |
| | | TTGAAGGACAGGAAGAGAGCCAGAATCTGCTGCTGCTGATCTCTCAGATTGTGG |
| | | AGAATCTGAGCGGATTCGATAACCAGAAAATGTACCTGAGAAACGACACCCAT |
| | | CTGACAACCATCTCCCAGCAGCTGTTCGGCGACTTCAGCGTTTTCAGCACCGCA |
| | | CTGAATTATTGGTATGAGACCAAAGTGAATCCAAAATTTGAAGCCGAGTACTCA |
| | | AAGGCCAACGAGAAGAAACGCGAGGCCCTGGACAAGACCAAGGCCAACTTTAC |
| | | AAAGCAGGACTATTTCAGTATCGCCTTCCTGCAGGAAGTGCTGGCAAACTACGT |
| | | GCTGACACTGGATAAAACCAGCGACGTGGTGCAGAAGTTCACCCCCACCTGTGT |
| | | GGCCGACTACTTCAATAATCACTTCGTGGCCAAAAAGGAGAATGAGACCGACA |
| | | AGACATTCGACCTGATCGCCAATATTACAGCCAAGTACCAGTGCATCCAGGGCA |
| | | TTCTGGAGAATGCCGACAGGTACGAAGACGAGCTCAAACAGGATCAGAAGCTG |
| | | ATCGACGATCTGAAGTTTTTCCTGGATGCTATCATGGAGCTGCTCCACTTCATTA |
| | | AGCCACTCCACCTGAAATCTGAATCCATTACCGAGAAGGACACCGCCTTCTATG |
| | | ACGTGTTTGAGAACTATTACGAAGCACTGAGCCTCCTGACACCTCTGTACAACA |
| | | TGGTCAGAAACTATGTGACCCAGAAGCCCTACTCCACCGAGAAAATCAAGCTG |
| | | AACTTTGAGAACGCCCAGCTGCTCAACGGATGGGACGCTAATAAGGAGGCCGA |
| | | CTACCTGACAACCATTCTGAAGAAGGATGGCAATTACTTCCTGGCTATCATGGA |
| | | TAAGAAGCACAATAAGGCCTTCCAGAAATTCCCTGAAGGAACCGACAACTACG |
| | | AGAAGATGGTGTATAAGCTGCTGCCTGGCGTCAACAAAATGCTGCCCAAGGTGT |
| | | TTTTCTCCAACAAAAACATCGCATACTTCAACCCATCAAAGGAGCTGCTGGAGA |
| | | ACTACAAGAAGGAGACCCACAAAAAGGGCGACACCTTTAATCTGGAGCACTGC |
| | | CACGCCCTGATTGACTTTTTCAAAGATTCTCTGAATAAGCACGAGGACTGGAAA |
| | | CACTTCGATTTTCAGTTCAGCGAAACTAAGAGCTACCAGGATCTGTCTGGATTTT |
| | | ACCGGGAAGTGGAGCACCAGGGCTACAAGATTAACTTCAAGAATATCGACAGT |
| | | GAGTATATCGATGGCCTGGTGAATGAGGGCAAGCTGTACCTGTTTCAGATCTAT |
| | | AACAAAGACTTTTCTCCCTATAGTAAAGGGAAGCCAAACATGCACACCCTCTAC |
| | | TGGAAGGCTCTGTTTGAGGAACAGAATCTGCAGAACGTGATCTACAAACTGAAC |
| | | GGGCAGGCCGAGATCTTCTTTCGCAAGGCCAGCATCAAGCCAAAGAATATCATC |
| | | ACCCACAAGGCCAACCAGCCCATCAAGGCCAAGAATCCCCTGACCCCCGAGGC |
| | | CAAGAACACCTTCGAGTACGATCTGATTAAGGACAAGCGGTTCACCGTGGACA |
| | | AGTTCCAGTTCCACGTGCCTATCACTATGAACTTTAAGGCCACCGGCGGAAGCT |
| | | ACATCAACCAGACTGTGCTGGAGTACCTGCAGAATAACCCAGAGGTGAAGATC |
| | | ATCGGACTGGACCGCGGAGAGAGGCACCTGGTGTACCTGACACTCATAGACCA |
| | | GCAGGGAAATATCCTGAAGCAGGAGTCTCTGAACACCATCTCCGACACAAAGA |
| | | TTGCCACACCATACCACAAGCTGCTGGACAACAAGGAAAAAGAGCGCGATCTG |
| | | GCCAGGAAGAACTGGGGCACAGTGGAGAATATCAAAGAGCTGAAGGAAGGAT |
| | | ACATCAGCCAGGTGGTGCACAAGATTGCCACAATGATGGTGGAGGAGAACGCA |
| | | ATCGTGGTGATGGAAGATCTGAACTTTGGATTCAAGCGCGGCAGATTCAAGGTG |
| | | GAAAAACAGATTTACCAGAAGCTGGAAAAGATGTTGATCGACAAGCTGAACTA |
| | | CCTGGTGCTCAAAAACAAGCAGCCCCACGAACTGGGGGGCTTGTATAACGCCCT |
| | | GCAGCTGACAAACAAATTCGAGTCTTTCCAGAAAATGGGCAAGCAGAGCGGCT |
| | | TTCTGTTTTACGTGCCTGCCTGGAATACCTCAAAGATCGATCCCACAACAGGCTT |
| | | CGTGAACTATTTTTACACCAAATATGAGAATGTGGAGAAAGCCAAAGCCTTTTT |
| | | CGATAAGTTCCAGAGCATCCGCTTCAACACCCGGGCAAACTACTTCGAGTTCGA |
| | | GGTGAAAAAGTACTCTGATTTCAACCCTAAAGCCGAAGACACAAAGCAAGAGT |
| | | GGATGATCTGCACCTTCGGCGAGCGGATCGAGACCAAGAGACAGAAGGACCAG |
| | | AACAACAATTTCGTGAGTACAACCATCAACCTGACCGAGAAAACAGAGGATTTT |
| | | TTCGGAAAGAACAACATCGTGTACGGCGACGGGAACTGTATCAAAAAGCAGAT |
| | | CGCCGCCAAGGAAGACAAGGACTTCTTCGAGACCCTGCTGTATTGGTTTAAGAT |
| | | GACACTGCAGATGAGAAACTCAGTGACAGGAACCGATGAGGACTACCTGATCA |
| | | GCCCCGTGATGAACGCCGATGGCATCTTCTACGACAGCAGGAAAGCCGACAAC |
| | | AACCTGCCAAAGGATGCCGACGCCAACGGCGCTTATCACATCGCTAAAAAGGG |
| | | ACTCTGGATACTGGAACAGATCAATAAGCCCAAGACCACAGAAGAACTGAAAA |
| | | AGATCAAGCTGGCCATTTCCAATAAGGAGTGGCTGCAGTACGTCCAGGAATGA |
| 83 | 79 | ATGAATACCACATACACCAACCTGTTTGCTCTGAGCAAGACACTGCGGTTCGAA |
| | | CTGATCCCTCAGGGCAAGACCCTGCACTTTATCCAGGAGAAGGGCCTGATCACA |
| | | AACGACAACAAGCGCGCCGAGTCCTACCAGAAGATGAAGAAGACCATTGACGA |
| | | GTTCCACAAGTATTTCATTGACCTGGCCCTGAAAAATGTGCGCCTGTCCTTTCTC |
| | | GAGGACTATCTGGACCTGTACAATCAGAGCGCCGATTACAAAAAGGAGCCCAA |
| | | GTTCAAGGAGGAACTGAAGAAAGTCCAGGACAACCTGAGAAAGGAGATTGTGC |
| | | TGAGCTTCAGTAAGGATGAGGCAAAGACAATCTTCTCCATTCTGGATAAGAAAG |
| | | AGCTGATAACCGAGGAACTGGAGAAGTGGTTCGAAAACCAGGAGAAAAAGGA |
| | | CCTGCACTTCGACGACAAGTTCAAAACATTCACTACCTACTTCACCGGGTTCCA |
| | | CCAGAATCGGAAGAACATGTATTCTTCAGAACCCAATTCCACCGCCATCGCCTA |
| | | CCGGTTGATCCACGAAAACCTGCCAAAATTTCTGGAAAACGCTAAGGCCTTCGA |
| | | ACGCATTAAGCAGGTGCCTGAGCTGCAGCTGAAAATCGAAAAGATCTACAAGG |
| | | ATTTCGAGCTGTATCTGAATGTCAACTCTATCGAGGAACTGTTCGAGCTGAATT |
| | | ACTTCAATGACGTGCTGACCCAGATGGGAATCGACGTGTATAACAATATCATCG |
| | | GCGGGCGGACAGAAACAGATGGCAAGCCAAAAATCCAGGGACTGAACGAGAT |
| | | CATCAACCTGTACAACCAGACCAAGTCCAAAAACGAGAGACTGCCCAAGCTGA |
| | | AGCAGCTGTATAAACAGATCCTGAGCGACCGGGTGTCCCTGTCATTTCTGCCTG |
| | | ACGCCTTCACAGACGGAAAACAGGTGCTGCAGGCCATCTTCGCCTTCTATAAAG |
| | | TGAACATTCTGTCCTATACGATCGACGGCCAGGCCGAGAGCAAGAATCTGCTGG |
| | | AGCTGATTCAGCAGCTCCTGGCCAACATCTCTTCCTTCGAGACAGAGCGGATCC |
| | | ACCTGAAGAACGACACCAATCTGACAACCATCTCCCAGCAGCTGTTCGGAGACT |
| | | TTTCTGTGTTCAGCACAGCCCTGAACTACTGGTACGAAACCAAAGTGTACCCCA |
| | | AGTTCGAAGCAGAGTATACCAAGGCCACCGAGAAGAAGAGGGAAACGCTGGA |
| | | GAAGACCAAAGCCGTGTTTACCAAGCAGGATTACTTTTCTATTGCCTTTCTGCAG |
| | | GAAATCATTACTGAGTATAGTCTGTCACTGGATAAGGACTCAGAGCTGATCACT |
| | | AAAATCACCCCCACATGTGTGGCCGACTACTTCAAAAATCACTTCGTGGCCAAG |
| | | AAGGAGAACGAGACCGATAAAACCTTCGGGTTCCTGGCTAACATCACAGCCAA |
| | | GTACCAGTGCATCCAGGGTACTCTGGAAAATGCCACAAACTATAACGAGGAGC |
| | | TGAAGCAGGATCAGAAGCTGATTGATGACATCAAGCTGTTCCTGGATACCCTGC |
| | | TGGAACTGCTGCACTTCATCAAGCCACTGCACCTCAAGAGCGACTCCATCACTG |
| | | AAAAAGACAACGCATTTTACGACCTGTTCGAGAATTACTACGAGGCACTGTCTC |
| | | TGCTGACCCCCCTGTACAACATGGTCAGAAATTACGTGACACAGAAGCCATATA |
| | | GCACCGAGAAAATTAAGCTGAATTTCGAAAACGCCCAGCTGCTGAACGGATGG |
| | | GACGTTAACAAGGAGGCCGATTACCTCACCACCATCCTGAAGAAGGAGGGAAA |
| | | CTACTTTCTGGCCATTATGGATAAGAAACACAACAAGGCTTTTCAGAAGTTTCC |
| | | CGAGGGCGAGAACAACTACGAGAAGATGACCTATAAGCTGCTGCCAGGCGTGA |
| | | ACAAGATGCTGCCCAAGGTGTTTTTCAGCAACAAGAATATCGCATACTTCAATC |
| | | CTTCCAAGGAGCTGGTGGAGAATTATAAGAACGAGACCCATAAGAAAGGCGAG |
| | | AAATTTAACCTGCTGCATTGCAGGCAGCTGATCGATTTCTTTAAGGACTCAATC |
| | | AACAAGCATGAGGATTGGAAACACTTTGATTTCCAGTTCAGCGAGACCAAAAG |
| | | CTACCAGGATCTGAGCGGCTTTTACCGGGAGGTGGAGCATCAGGGCTATAAAAT |
| | | TAACTTCAAAAACATCGACAGTGCCTATATCGACAGCCTGGTGAATGAGGGGA |
| | | AGCTGTTTCTGTTCCAGATCTATAACAAGGACTTTTCTCCATTCTCTAAGGGGAA |
| | | GCCAAATATGCACACCCTGTACTGGAAAGCCCTGTTTGAGGACCAGAATCTGAA |
| | | GAACGTGAAGTACAAGCTGAACGGGCAGGCTGAGATCTTTTTCAGAAAGGCCA |
| | | GCATCAAACCGGAGAACATCATCACTCACAAGGCAAACCAGTCTATCAAAGCA |
| | | AAGAATCCCCTGACCCCTGACGCCAAAAATACTTTCGATTACGACCTGATCAAG |
| | | GATAAGAGGTACACAGTGGACAAATTCCAGTTCCACGTGCCTATCACCCTGAAC |
| | | TTTAAGGCCACCGGGGGATCTTTTATCAACCAGAATGTGCTGGAATACCTGAAA |
| | | GAGAACCCTGAGGTCAAGATTATCGGACTGGACAGGGGCGAGCGCCACCTCGT |
| | | GTATCTGACCCTGATCGACCAGCAGGGTAATATTCTGAAGCAGGAGTCCCTGAA |
| | | CACTATCACTGATGCAAAGATCGCCACCCCTTATCACCAGCTCCTGGACATCAA |
| | | GGAGAAGGAGCGGGACTTTGCCAGGAAGAATTGGGGCACCGTGGAGAACATCA |
| | | AGGAGCTGAAAGAGGGATATATCTCACAGGTGGTGCATAAAATCGCTACCATG |
| | | ATGGTGGAGGAGAACGCAATCGTGGTCATGGAGGACCTGAACTTTGGCTTCAA |
| | | GCGCGGAAGATTCAAGGTGGAAAAGCAGATCTACCAGAAGCTCGAAAAGATGG |
| | | TGATCGACAAACTGAATTACCTGGTTCTGAAAGACAAGCAGCCCACCGAGCTCG |
| | | GCGGGCTGTACAACGCCCTGCAGCTGACAAACAAGTTTGAGAGCTTCCAGAAG |
| | | ATGGGAAAGCAGAGTGGCTTCCTGTTCTACGTGCCTGCTTGGAACACCAGCAAA |
| | | ATTGATCCCACAACCGGCTTCGTGAACTACTTTTTCACAAAATATGAGAATGTG |
| | | GACAAGGCCAAGGTGTTCTTCGACAAGTTTCAGTCTATCAGATACAATACAAAG |
| | | GCCAACTACTTCGAGTTTGAGGTGAAGAAATATTCCGACTTCAACCCTAAGGCC |
| | | GAAGGGACCCTGCAGGAGTGGACCGTCTGTAGCTACGGCGAACGCATTGAGAC |
| | | CAAACGGCTGAAGGACCAGAATAACAACTTCGTGTCCACACCTATCAACCTGAC |
| | | CGAGAAAATCGAGGACTTCCTGGGCAGGAACAACATCGTGTACGGCGACGGCA |
| | | CATGCATCAAAAGCCAGATTGCAGAGAAGAATGCAAAGGAGTTCTTTGAAGGA |
| | | CTGCTGTACTGGTTCAAAATGACTCTGCAGATGAGAAACAGCGCCACCGGAACA |
| | | GACGAGGATTACCTGATTTCTCCGGTGATGAATGCCCAGGGCGAGTTCTACGAC |
| | | TCCAGGAAGGCCGACGAAACCCTGCCTAAGGATGCCGACGCTAATGGCGCTTA |
| | | CCACATCGCCAAGAAAGGACTGATGTGGCTGGAACAGATCAAGAGCTTCGACG |
| | | GAAATGACTGGAAGAAGCTGGAGCTGGACAAAAGCAATAGGGGATGGCTGCAG |
| | | TACATCCAGCAGAGGAAGTGA |

TABLE S6C
Direct Repeat Group 6

| SEQ ID | | SEQ ID | |
|---|---|---|---|
| NO | Direct Repeat (Variant #1) | NO | Direct Repeat (Variant #2) |
| 84 | GGCTACAAAACCTTTTAAATTTCT | 85 | GCTACAAAACCTTTTAAATTTCTA |
| | ACTATTGTAGAT | | CTATTGTAGAT |
| 86 | ATCTACAATAGTAGAAATTTAGTT | 87 | ATCTACAATAGTAGAAATTTAGTT |
| | TGTCTTTAAAAC | | TGTCTTTAAAAC |
| 88 | GTTTTTAAGACCAATTAAATTTCT | 89 | GTTTTTAAGACCAATTAAATTTCT |
| | ACTATTGTAGAT | | ACTATTGTAGAT |
| 90 | ATCTACAATAGTAGAAATTTAAA | 91 | ATCTACAATAGTAGAAATTTAAA |
| | AGGTCTTGAAAAC | | AGGTCTTGAAAAC |

TABLE S6D
crRNA Sequences Group 6

| SEQ | | |
|---|---|---|
| ID | | |
| NO | Sequence | FIG |
| 92 | GGCUACAAAACCUUUUAAAUUUCUACUAUUGUAGAU | FIG. 6A |
| 93 | GUUUUAAAGACAAACUAAAUUUCUACUAUUGUAGAU | FIG. 6B |
| 94 | GUUUUUAAGACCAAUUAAAUUUCUACUAUUGUAGAU | FIG. 6C |
| 95 | GUUUUCAAGACCUUUUAAAUUUCUACUAUUGUAGAU | FIG. 6D |

### Group 7 Sequences (SEQ ID Nos: 100-117)

TABLE S7A
Enzyme Sequences Group 7

| SEQ | |
|---|---|
| ID | |
| NO | Sequence |
| 100 | MKEIKELTGLYSLTKTIGVELKPVGKTQELIEARKLIEQDDQRAEDYKIVKDIIDRYHKDFIDK |
| | CLNCVKIKKDDLEKYVSLAENSNRDAEDFDNIKTKMRNQITEAFRKNSLFTNLFKKNLIKEY |
| | LPAFVSEEEKSVVNKFSKFTTYFDAFNDNRKNLYSGDAKSGTIAYRLIHENLPMFLDNIASFN |
| | TISEIGVNEYFSGIEAEFTDTLDGKHLVDFFQVDYFNNTLTQKKIDNYNYVVGAVNKAVNLY |
| | KQQHKNVRIPLLKTLHKMILSDRVTPSWLPERFECDEEMLTAIKAAYESLKEVLVGDDDDSL |
| | RNLLLNIDNFDLEHIYIAKDSGLTSISQQIFGYYDTYTLAIKDQLQRENPNLYDERIDKLYKKE |
| | GSFSIAYLNRLVDTKEHITINEYYRLLGSYCREEGKRKDDFFKQIDGAYCAISHLFWGKHGEI |
| | AQSDSDIELIQKLFDDYKGLQRFIKPLLGHGDEADKDNEFDAKLRKVWDELDIITPLYDKVR |
| | NWLSRKIYNPEKIKLCFENNGKLLSGWSDNQTKSDNGTQYGGYIFRKKNEIGEYDFYLGISA |
| | DAKLFRRDENICYEDGMYERFDYYHLTPNTLLGKSYIGNYGEDSKAVLSAFNAAITKLQLEK |
| | KLVPKDNEKVPTYLKRLKQNYANFYQILMNDDNVVDAYKSMKQHIFATLTSLIRVPAAIEL |
| | ATQTDLDIDELIDEILNLSSESFGYFPVATAAIEEANKREKKPLFLFKMSNKDLSYAAKSSEGL |
| | RKSRGTENLHTMYLKALLGMTQNVFSIGSGMVFFRHKTKGLAETTARHKANEFVANKNKL |
| | NDKKKSIFAYEIVKNKRYTVDKYLFKLSVKLNYSQPNNNKIDVNSEVREIISNGGIKHIIGIDR |
| | GERNLLYLSLIDLKGNIVMQKSLNILKNEHNVKGTDYKGLLTEREGERQDARRNWKKIANI |
| | KDLKRGYLSQVVHIISKMMVEYNAIVVLEDLNPGFIRGRQKIERNVYEQFERMLIDKLNFYV |
| | DKHKDANETGGLLHALQLTSEFENFKKSEHQNGCLFYIPAWNTSKIDPATGFANLFDTRYTN |
| | AVEAQKFFSKFDEIRYNEEKDWFEFEFDYDKFTQKAHGTRTKWTLCTYGMRLRSFKNPAKQ |
| | YNWDSEVVALTDEFKRILGKAGIDIHENLKDAICNLEGKKDLEPLMQFMKLLLQLRNSRKNP |
| | EEDYILSPVADENGIFYDSRSCGDTLPKNADANGAYNIARKGLMLIEQIKNTEDLDTIKFDISS |
| | KAWLNFAQQKPYKNG |
| 101 | MKEIKELTGLYSLTKTIGVELKPVGKTQELIEAKKLIEQDDQRAEDYKIVKDIIDRYHKDFIDK |
| | CLNCVKIKKDDLEKYVSLAENSNRDAEDFDNIKTKMRNQITESFKKNPLFVGLFKKELITNY |
| | LPNFVSEEERVVVNKFSKFTTYFDAFNDNRKNLYSGDAKSGTIAYRLIHENLPMFLDNIASFN |
| | KISETGVNKYFSDIENEFTAILYEMHLSDLFQIDYFNNTLTQKKIDNYNYIVGAVNKAVNLYK |
| | QQHKTVRVPLLKTLHKMILSERVTPSWLPERFESDEEMLTAIKETYESLKDVLVGGNDDSLR |
| | NLLLNIDNFDLEHIYIANDSGLTSISQQIFGYYDTYTLAIKDQLQRENPATKKQRENPATKKQ |
| | RENPNLNDDCIDKLYKKEGSFSIAYLNRLVDTKEHITINEYYRLLGSYWREEGKRKDDFFKQI |
| | DGAYSDMLYLFSTEHGEIAQSDSDTAVVQQLLEAYKGLQRFIKPLLGHGDEADKDNEFDAK |
| | LRKVWDELNIITPLYDKVRNWLSRKIYNPEKIKLYFENNGKLLSGWSDSQTEKDNGTQYGG |
| | YIFRKKNEIGEYDFYLGISTDAKLFRRDETICYEDGMYERFDYYHLKPTTLLGKSYIGNYGED |
| | SNAVLSAFKNAVTKLHLEKKLVPKDNEKVPTYLKRLKQKYANFYQILMNDVNVVDAYKS |
| | MKQHILATLASLIRVPAAIELAAQTDLDIDELIDEIMNLPSESFGYFPVATAAIEEANKREKKP |
| | LFLFKMSNKDLSYAAKSSEGLRKSRGTENLHTMYLKALLGMTQNVFSIGSGMVFFRHKTKG |
| | LAETTARHKANEFVANKNKLNDKKKSIFAYEIVKNKRFTVDKYLFKLSVKLNYSQPNNNKI |
| | DVNSEVREIISNGGIKHIIGIDRGERNLLYLSLIDLKGNIVMQKSLNILKDDHNAKGTDYKGLL |
| | TEREGERQDARRNWKKIANIKDLKRGYLSQVVHIISKMLVEYNAIVVLEDLNPGFIRGRQKIE |
| | RNVYEQFERMLIDKLNFYVDKHKDINEVGGLLHAFQLTSEFKKFKKSEYQNGCLFYIPAWK |
| | TSKIDPATGFANLLDTRYTNADKALEFFRKFDAIRYNEEKDWFEFEFDYDKFTQKAHGTRTK |
| | WILCTHGKRLRFKRNSTRVQEVVVLTDEFKKILGEAGIDIHVNLKEAICNLEGKKNLEPLMQ |
| | FMKLLLQLRNSKAGTDEDYILSPVADENGIFYDSRSCGEQLPENADANGAYNIARKGLMLIR |
| | QIKEAKELDKVKFDISNKAWLNFAQQKPYKNG |
| 102 | MKEIKELTGLYSLTKTIGVELKPVGKTQELIEARKLIEQDDQRAEDYKIVKDIIDRYHKDFIDK |
| | CLNCVKIEKDDLEKYVSLTENSNREAVDFDNIKTKMRNQITESFKKNPLFVGLFKKELITNYL |
| | PNFVSEEERVVVNKFSKFTTYFDAFNNNRKNLYSGDAKSGTIAYRLIHENLPMFLDNIASFNK |
| | ISETRVNEYFSSIEAEFTDTLNGKHLADLFQIDYFNNTLTQKKIDNYNYIVGAVNKAVNLYKQ |
| | QHKNIRIPLLKKIHKMILSDRVTPSWLPERFESDEEMLTAIKAAYESLKEVLVGDDDDSLRNL |
| | LLNIDNFDLEHIYIAKDSGLTSISQQIFGYYDTYTLAIKDQLQRKNPATKKQRENPNLYDERID |
| | KLYKKEGSFSIAYLNRLVDTKEHITINEYYRLLGSYCREGGKSNDDFFKQIDGAYSAISYLFS |
| | AEHGEIAQSDSDTAVVQKLLEAYKGLQRFIKPLLGHGDEADKDNEFDVKLRKVWDELNIITP |
| | LYDKVRNWLSRKIYNPEKIKLYFENNGKLLSGWSDSQTEYDNGTQYGGYIFRKKNEIGEYD |
| | FYLGISADAKLFRRDETICYEDGMYERLDYYNLKPNTLLGNSYIGNYGEDSNAVLSAFNDAV |
| | TKLHLEKKLVPKDNEKVPTYLKRLKQDYANFYQILMNDNNVVDAYKSMKQHILATLASLIR |
| | VPAAIELTTQTNLDIDKLIDEIINLPSESFGYFPVATAAIEEANNREKKPLFLFKMSNKDLSYAE |
| | KFSKGDRKSRGTENLHTMYLKALLGMTQNVFSIGSGMVFFRHNTEGLAETTARHKANEFIA |
| | NKNKLNDKKKSIFDYEIVKNKRFTVDKYLFHLSLKLNYTQPNKFDINSKVREIIRNGGIKHIIG |
| | IDRGERNLIYLSLIDMEGNIVMQKSLNILKDDHNAKGTDYKGLLTEREGENKEARRNWKKIA |
| | NIKDLKRGYLSQVVHIISKMMVEYNAIVVLEDLNPGFIRGRQKIERNVYEQFERMLIDKLNFY |
| | VDKHKDANETGGLLHALQLTSEFKNFKKSEHQNGCLFYIPAWNTSKIDPATGFVNLFDTRYT |
| | NAEKALEFFRKFDAIRYNEEKDWFEFEFDYDEFTQKAHGTRTRWTLCTHGKRLRSFRNPAK |
| | QYNWDSEVVALTDEFKRILGEAGIDIHENLKDAIRNLEGKRRKYLEPLMQFMKLLLQLRNSR |
| | KNPEEDYILSPVADENGVFYDSRSCGDTLPKNADANGAYNIARKGLMLIRQIKEAKELGKVK |
| | YDISNKAWLNFAQQKPYKNE |

TABLE S7B
Human Codon Optimized Nucleotide Sequences Group 7

| SEQ | Corres- | |
|---|---|---|
| ID | ponding | |
| NO | AA | Sequence |
| 103 | 100 | ATGAAGGAGATAAAAGAGCTCACTGGCCTTTATTCCCTTACCAAGACAATCGG |
| | | CGTCGAGCTAAAACCTGTAGGGAAGACACAGGAGCTGATTGAGGCCCGAAAAC |
| | | TCATAGAGCAGGATGACCAAAGAGCAGAGGATTACAAGATAGTAAAGGACAT |
| | | CATCGATCGCTATCATAAGGACTTTATTGACAAGTGCTTAAACTGTGTCAAGAT |
| | | AAAAAAGGACGATTTAGAGAAGTACGTCTCGCTGGCGGAAAACTCCAACCGTG |
| | | ATGCCGAGGATTTTGACAACATAAAGACCAAAATGCGGAATCAGATCACGGAG |
| | | GCTTTTCGAAAGAACTCACTGTTTACAAACCTCTTCAAGAAAAACCTCATTAAG |
| | | GAGTATCTCCCCGCTTTCGTTTCTGAGGAGGAGAAATCAGTGGTGAATAAGTTT |
| | | TCGAAGTTCACAACCTATTTCGATGCTTTCAACGATAACCGTAAAAACCTGTAC |
| | | AGCGGCGACGCCAAATCTGGGACCATAGCTTATCGTCTCATCCATGAAAACCTT |
| | | CCAATGTTTCTCGACAATATCGCCAGTTTTAACACTATTAGCGAGATCGGTGTG |
| | | AACGAATATTTCAGCGGCATTGAAGCAGAGTTTACAGATACCCTGGATGGCAA |
| | | GCATCTGGTCGATTTTTTCCAGGTCGATTACTTCAACAATACACTTACGCAGAA |
| | | AAAGATCGATAACTACAATTACGTGGTTGGGGCCGTCAACAAAGCTGTGAATC |
| | | TGTATAAGCAGCAACACAAGAACGTTCGTATTCCCTTGTTAAAGACGCTCCATA |
| | | AAATGATTCTTAGTGACAGAGTGACTCCGTCATGGCTGCCCGAGCGGTTTGAAT |
| | | GCGATGAGGAGATGCTGACCGCCATTAAAGCCGCATACGAGAGTCTAAAAGAA |
| | | GTGCTCGTGGGCGACGATGATGACAGTCTGCGCAATCTGCTGCTCAATATCGAC |
| | | AACTTTGACCTTGAACATATCTATATTGCGAAAGATAGCGGGTTAACCTCTATC |
| | | AGCCAGCAGATTTTCGGTTATTATGACACCTACACACTGGCCATCAAAGATCAG |
| | | CTTCAACGAGAGAACCCCAATTTATACGACGAAAGGATTGACAAACTCTACAA |
| | | AAAGGAGGGCTCTTTTTCTATTGCCTATTTGAACAGGCTGGTGGATACCAAGGA |
| | | GCATATAACAATCAACGAGTACTATAGGCTGTTAGGATCATATTGTAGGGAAG |
| | | AGGGGAAGAGAAAAGATGACTTTTTCAAGCAAATCGACGGGGCTTACTGTGCA |
| | | ATTTCCCATTTGTTTTGGGGTAAGCATGGTGAGATCGCACAATCAGACTCAGAC |
| | | ATAGAACTCATCCAGAAACTATTTGATGACTACAAAGGACTGCAGAGATTTATC |
| | | AAGCCTCTGCTCGGCCACGGAGATGAGGCTGACAAGGATAACGAATTTGATGC |
| | | TAAATTGCGAAAAGTCTGGGACGAATTGGATATTATCACCCCATTGTATGACAA |
| | | AGTCAGAAATTGGCTTTCCAGAAAAATCTACAACCCGGAAAAGATCAAATTGT |
| | | GCTTCGAGAATAACGGCAAGTTACTGTCTGGCTGGTCTGATAATCAAACTAAAA |
| | | GCGATAACGGGACTCAGTATGGAGGCTATATTTTTCGGAAGAAAAACGAAATC |
| | | GGGGAGTACGACTTCTATCTGGGCATCTCCGCGGACGCAAAACTCTTCCGGCGC |
| | | GATGAGAACATCTGCTATGAAGATGGCATGTACGAAAGATTCGATTACTATCA |
| | | CCTGACTCCAAACACCCTGCTTGGTAAATCATACATCGGAAATTATGGGGAGG |
| | | ATAGCAAAGCAGTACTATCAGCCTTCAATGCAGCCATAACTAAACTACAACTG |
| | | GAGAAGAAACTGGTACCCAAAGATAATGAGAAAGTACCTACATACCTTAAGCG |
| | | GCTGAAGCAGAATTACGCAAATTTCTACCAAATCCTGATGAATGACGACAATG |
| | | TGGTGGATGCTTATAAAAGCATGAAACAGCACATCTTCGCCACGCTCACCTCCC |
| | | TTATCCGCGTCCCTGCAGCTATTGAACTCGCCACCCAGACTGACCTGGACATTG |
| | | ACGAGCTGATCGACGAAATCTTGAATTTGAGCAGTGAGTCTTTCGGGTACTTCC |
| | | CAGTGGCCACCGCCGCTATTGAGGAAGCCAACAAAAGAGAAAAAAAGCCGCT |
| | | GTTCCTCTTCAAGATGAGTAATAAAGACCTATCATACGCCGCAAAGTCCTCTGA |
| | | AGGATTGAGAAAGAGTAGGGGAACCGAGAACCTGCATACTATGTATCTGAAAG |
| | | CGCTACTGGGGATGACACAAAACGTGTTCAGCATTGGGAGCGGTATGGTCTTCT |
| | | TCAGGCACAAAACAAAAGGCCTGGCGGAAACTACGGCTAGGCACAAAGCCAA |
| | | TGAGTTCGTGGCCAACAAGAATAAGCTCAATGATAAGAAGAAGAGCATCTTCG |
| | | CTTACGAAATTGTCAAGAATAAACGGTATACTGTAGATAAGTACCTCTTCAAAC |
| | | TGTCAGTCAAGCTGAATTACTCCCAGCCCAACAATAATAAGATCGATGTGAATT |
| | | CCGAGGTGCGGGAAATAATCTCTAATGGAGGTATTAAGCACATTATCGGAATC |
| | | GATAGGGGAGAGAGGAATCTTCTCTATCTTAGCCTGATCGACCTAAAAGGAAA |
| | | TATTGTGATGCAGAAGTCCCTCAACATTTTAAAGAACGAACATAACGTGAAGG |
| | | GCACAGACTACAAAGGCCTTTTAACAGAACGCGAAGGCGAACGCCAGGATGCC |
| | | AGACGCAATTGGAAGAAAATTGCGAACATCAAGGATCTGAAGAGGGGCTACTT |
| | | GAGTCAGGTTGTGCACATTATCAGCAAGATGATGGTGGAGTACAATGCAATAG |
| | | TTGTGTTAGAAGACTTGAACCCCGGATTCATACGAGGACGCCAGAAGATAGAA |
| | | AGGAACGTTTACGAGCAGTTTGAGCGGATGCTCATTGACAAGCTTAACTTTTAC |
| | | GTTGACAAGCACAAGGACGCCAACGAAACAGGTGGCCTGTTGCACGCTCTGCA |
| | | GTTGACGTCTGAGTTTGAGAATTTTAAGAAGTCTGAACACCAGAACGGCTGCCT |
| | | ATTCTATATCCCTGCCTGGAACACTTCCAAGATCGACCCCGCCACCGGATTTGC |
| | | TAATCTGTTCGACACTCGGTACACCAATGCCGTTGAGGCGCAGAAGTTTTTTTC |
| | | CAAATTCGACGAAATTCGTTACAACGAAGAGAAGGATTGGTTCGAATTTGAGT |
| | | TCGATTACGACAAATTCACACAGAAGGCACACGGTACCCGAACAAAGTGGACC |
| | | CTCTGCACTTATGGGATGAGGCTGCGGAGCTTTAAGAACCCTGCCAAACAATAT |
| | | AATTGGGATAGTGAGGTTGTGGCTTTGACAGACGAATTCAAGAGAATACTGGG |
| | | GAAGGCTGGAATCGATATTCACGAAAACCTGAAAGACGCCATTTGTAACCTCG |
| | | AGGGTAAAAAGGACCTGGAACCTCTGATGCAGTTTATGAAGCTGCTGCTGCAG |
| | | CTTCGCAATTCTCGGAAGAACCCAGAAGAGGATTACATTCTGTCGCCTGTGGCA |
| | | GACGAGAATGGCATTTTTTACGACTCCCGCAGTTGTGGCGACACCTTGCCAAAG |
| | | AATGCCGACGCCAATGGGGCATATAACATCGCAAGAAAAGGGCTGATGCTGAT |
| | | TGAGCAGATCAAAAATACCGAGGACCTCGACACTATCAAATTCGATATAAGCT |
| | | CCAAGGCTTGGCTGAACTTTGCTCAACAGAAGCCATATAAGAATGGATGA |
| 104 | 101 | ATGAAGGAGATTAAGGAACTGACCGGGCTGTACAGCCTCACCAAGACAATCGG |
| | | GGTGGAGCTGAAGCCCGTGGGGAAGACACAGGAGCTGATCGAGGCCAAAAAG |
| | | CTGATCGAACAGGACGACCAGCGTGCCGAGGACTACAAAATAGTGAAAGATAT |
| | | CATCGACCGGTACCACAAGGACTTCATTGATAAGTGCCTGAATTGTGTGAAGAT |
| | | CAAGAAGGATGACCTGGAGAAGTACGTCAGTCTGGCTGAGAATTCTAACAGAG |
| | | ACGCCGAGGATTTCGATAATATTAAAACCAAGATGCGGAATCAGATCACAGAA |
| | | AGCTTCAAGAAGAACCCACTCTTCGTGGGGCTGTTTAAGAAGGAGCTGATCAC |
| | | GAATTACCTGCCAAACTTCGTGAGCGAGGAGGAAAGAGTCGTGGTGAATAAAT |
| | | TCAGCAAGTTCACCACCTATTTCGATGCCTTTAATGACAATCGGAAGAACCTGT |
| | | ACTCCGGCGATGCCAAGTCCGGCACCATCGCATATCGGCTGATCCACGAGAAC |
| | | CTGCCCATGTTTCTGGACAATATCGCCAGCTTCAACAAAATCAGCGAAACCGGC |
| | | GTGAACAAATACTTCTCAGACATCGAGAACGAGTTCACAGCCATCCTGTACGA |
| | | GATGCACCTGTCCGATCTGTTCCAGATCGACTACTTTAATAATACCCTGACCCA |
| | | GAAGAAGATTGACAACTACAACTACATCGTGGGTGCTGTGAACAAGGCCGTGA |
| | | ACCTCTATAAGCAGCAGCACAAGACCGTGAGGGTACCTCTGCTCAAGACCCTG |
| | | CACAAGATGATCCTGTCCGAGCGGGTGACACCCAGCTGGCTGCCAGAGCGCTT |
| | | CGAAAGCGATGAGGAGATGCTGACCGCCATCAAAGAGACCTACGAGTCCCTGA |
| | | AGGATGTGCTGGTGGGGGGGAACGACGATAGTCTGCGCAACCTGCTGCTCAAC |
| | | ATCGACAACTTCGACCTGGAGCACATTTACATCGCCAACGATAGCGGCCTGACC |
| | | AGCATCAGCCAGCAGATCTTCGGGTACTACGACACTTACACACTGGCCATCAA |
| | | GGACCAGCTGCAGAGAGAGAATCCTGCCACCAAGAAACAGAGAGAGAATCCT |
| | | GCTACCAAAAAGCAGAGAGAAAATCCAAACCTGAATGATGACTGCATCGACAA |
| | | GCTGTATAAGAAGGAGGGCTCTTTCAGCATTGCCTACCTGAATAGGCTGGTGGA |
| | | CACCAAGGAGCACATCACCATTAACGAATATTATCGACTGCTGGGGAGCTATT |
| | | GGAGGGAGGAGGGAAAAAGAAAGGACGACTTCTTCAAGCAGATTGATGGCGC |
| | | CTACAGCGACATGCTGTATCTTTTTTCCACAGAACACGGGGAGATCGCACAGTC |
| | | TGACAGCGACACAGCCGTGGTGCAGCAGCTGCTGGAGGCCTACAAGGGGCTGC |
| | | AGAGATTTATCAAACCTCTGCTGGGCCACGGGGACGAGGCTGACAAGGATAAC |
| | | GAATTTGACGCCAAACTGAGGAAGGTGTGGGATGAACTGAATATTATCACCCC |
| | | CCTGTACGACAAGGTGAGGAATTGGCTGAGCAGAAAAATTTATAATCCAGAGA |
| | | AGATCAAGCTGTACTTTGAGAACAATGGGAAGCTGCTGAGCGGGTGGTCAGAT |
| | | AGCCAGACCGAGAAGGACAACGGCACTCAGTACGGCGGCTACATCTTTCGGAA |
| | | AAAAAATGAAATAGGAGAATACGATTTCTACCTGGGAATCAGTACCGACGCCA |
| | | AGCTCTTCCGCAGAGACGAGACAATCTGCTACGAGGACGGCATGTACGAGAGG |
| | | TTTGATTATTATCACCTGAAGCCAACCACACTGCTCGGCAAGAGCTACATTGGC |
| | | AATTACGGCGAGGACAGTAACGCCGTTCTGAGCGCCTTCAAAAACGCAGTGAC |
| | | CAAGCTGCACCTGGAGAAGAAGCTGGTCCCTAAGGACAACGAAAAAGTCCCTA |
| | | CCTACCTGAAGAGGCTCAAGCAGAAATACGCTAACTTCTACCAGATCCTGATG |
| | | AATGATGTGAATGTGGTGGACGCCTACAAGTCTATGAAGCAGCACATCCTGGC |
| | | TACCCTGGCTTCCCTGATCAGAGTCCCTGCCGCCATTGAACTGGCAGCCCAGAC |
| | | CGACCTGGACATCGATGAGCTGATCGACGAGATCATGAACCTGCCTTCTGAGA |
| | | GCTTCGGATACTTTCCCGTGGCAACCGCCGCCATCGAGGAAGCTAACAAAAGA |
| | | GAAAAGAAGCCCCTGTTTCTGTTCAAGATGTCCAATAAAGACCTGAGCTACGCC |
| | | GCTAAGTCTTCCGAGGGCCTTAGAAAGAGCAGAGGGACAGAGAACCTGCACAC |
| | | AATGTACCTTAAGGCCCTGCTGGGCATGACACAGAACGTCTTTAGCATCGGCTC |
| | | TGGCATGGTGTTCTTTAGACACAAGACCAAGGGACTGGCCGAAACCACAGCCC |
| | | GGCACAAGGCCAACGAGTTTGTGGCCAATAAAAATAAGCTGAACGACAAGAA |
| | | AAAGAGTATCTTCGCTTACGAGATTGTGAAGAACAAGAGATTTACAGTCGACA |
| | | AGTACCTGTTTAAGCTGAGCGTGAAGCTCAACTACTCCCAGCCCAATAACAACA |
| | | AAATCGACGTGAACAGCGAGGTGAGAGAAATCATCTCTAACGGGGGGATCAAG |
| | | CACATCATCGGCATCGACCGGGGGGAGCGCAACCTCCTGTACCTGAGCCTGAT |
| | | CGACCTGAAGGGCAATATCGTGATGCAGAAGAGCCTGAATATCCTGAAAGATG |
| | | ATCATAACGCAAAAGGAACCGACTACAAGGGGCTGCTCACTGAGCGGGAGGGC |
| | | GAGAGGCAGGACGCCAGACGCAACTGGAAGAAGATCGCCAACATCAAGGATC |
| | | TGAAAAGAGGATACCTGTCCCAGGTGGTGCATATTATCTCCAAGATGCTCGTGG |
| | | AGTACAACGCTATCGTGGTGCTGGAGGACCTGAATCCAGGCTTTATTCGGGGAC |
| | | GGCAGAAGATCGAGAGAAATGTGTACGAGCAGTTCGAGAGAATGCTGATTGAC |
| | | AAACTGAACTTTTATGTGGATAAGCACAAGGATATCAATGAGGTGGGCGGACT |
| | | GCTGCACGCTTTTCAGCTCACCAGTGAGTTCAAGAAGTTCAAAAAATCAGAATA |
| | | TCAGAATGGCTGCCTCTTCTACATCCCTGCATGGAAGACAAGCAAGATTGATCC |
| | | AGCTACCGGCTTCGCTAACCTGCTGGACACCCGCTACACAAACGCCGATAAGG |
| | | CCCTGGAGTTTTTTCGCAAGTTCGACGCCATCAGATACAACGAGGAGAAAGATT |
| | | GGTTTGAGTTTGAGTTTGACTATGACAAATTTACACAGAAAGCTCACGGCACAC |
| | | GGACCAAGTGGATTCTGTGCACCCATGGAAAGAGACTGCGGTTCAAGAGAAAT |
| | | AGCACCAGAGTGCAGGAAGTGGTGGTGCTGACAGACGAGTTTAAGAAAATCCT |
| | | GGGGGAGGCAGGAATTGATATCCACGTGAACCTCAAAGAAGCCATCTGCAACC |
| | | TGGAGGGCAAAAAGAACCTGGAGCCCCTGATGCAGTTTATGAAGCTGCTGCTG |
| | | CAGCTGAGGAATAGCAAGGCCGGCACAGACGAGGACTACATTCTGTCCCCTGT |
| | | GGCTGACGAAAACGGCATCTTTTACGATTCCAGGTCCTGCGGCGAACAGCTGCC |
| | | AGAGAACGCTGACGCTAATGGCGCCTATAATATCGCCAGGAAGGGGCTGATGC |
| | | TGATTCGGCAGATCAAGGAGGCCAAAGAGCTGGACAAAGTGAAGTTCGACATC |
| | | AGCAACAAGGCCTGGCTGAACTTTGCCCAGCAGAAGCCTTACAAGAATGGCTA |
| | | G |
| 105 | 102 | ATGAAAGAAATTAAAGAGCTGACCGGACTGTACTCCCTGACCAAGACCATCGG |
| | | GGTGGAACTGAAGCCTGTGGGAAAGACCCAGGAGCTGATCGAGGCCCGTAAAC |
| | | TGATTGAGCAGGACGATCAGAGAGCCGAGGATTACAAGATCGTGAAAGACATC |
| | | ATCGATAGATACCACAAGGACTTTATCGATAAGTGTCTGAACTGTGTGAAAATT |
| | | GAAAAAGACGACCTGGAGAAGTATGTGTCCCTGACCGAAAATTCCAACAGAGA |
| | | GGCTGTGGACTTCGACAATATCAAAACAAAAATGAGGAACCAAATCACCGAGA |
| | | GCTTTAAGAAGAACCCTCTGTTCGTTGGGCTGTTCAAGAAGGAGCTGATCACAA |
| | | ACTATCTGCCAAACTTCGTGTCCGAAGAGGAGCGGGTGGTGGTGAACAAGTTC |
| | | AGTAAGTTTACCACATACTTCGACGCCTTCAATAACAACCGGAAGAATCTGTAC |
| | | TCAGGCGACGCCAAGAGCGGGACCATCGCCTATAGGCTGATCCACGAAAACCT |
| | | GCCTATGTTTCTGGACAACATCGCCAGCTTCAACAAAATCAGCGAGACCCGGGT |
| | | GAACGAGTATTTCAGCAGCATTGAGGCTGAGTTCACCGACACCCTGAATGGCA |
| | | AGCACCTGGCCGATCTGTTCCAGATCGATTACTTCAACAATACCCTGACACAGA |
| | | AGAAAATCGATAATTACAATTATATCGTCGGCGCCGTGAACAAGGCAGTGAAC |
| | | CTGTATAAGCAGCAGCATAAGAACATCAGGATCCCACTGCTGAAAAAAATCCA |
| | | CAAAATGATCCTCTCCGACAGGGTGACCCCTTCATGGCTGCCTGAGCGGTTCGA |
| | | GTCCGATGAGGAGATGCTGACCGCCATCAAAGCAGCCTACGAGAGCCTGAAGG |
| | | AGGTGCTGGTGGGCGACGACGATGACTCTCTGAGGAACTTGCTGCTTAACATTG |
| | | ATAATTTCGACCTGGAGCATATCTACATCGCTAAGGACTCCGGCCTGACCTCTA |
| | | TTTCCCAGCAGATTTTTGGGTACTATGACACATACACTCTGGCCATCAAAGATC |
| | | AGCTGCAGAGAAAAAATCCTGCCACCAAGAAGCAGCGGGAAAACCCCAACCT |
| | | GTATGACGAAAGAATTGACAAGCTGTATAAGAAAGAGGGAAGCTTTTCCATCG |
| | | CCTATCTGAACCGGCTGGTGGATACCAAGGAACACATTACCATTAACGAGTACT |
| | | ATAGGCTGCTGGGAAGCTACTGCAGGGAAGGAGGCAAGTCCAATGATGATTTC |
| | | TTTAAGCAGATCGACGGAGCCTATTCAGCCATCAGCTACCTGTTCTCTGCCGAG |
| | | CACGGCGAGATCGCACAGAGCGACAGCGATACCGCCGTGGTGCAGAAGCTGCT |
| | | GGAGGCCTACAAAGGCCTGCAGCGCTTCATCAAGCCACTGCTGGGACACGGGG |
| | | ACGAAGCCGATAAGGACAACGAGTTTGACGTGAAGCTGCGGAAGGTGTGGGAT |
| | | GAGCTGAACATCATCACGCCACTGTATGACAAGGTGCGAAATTGGCTGTCTCGC |
| | | AAAATTTATAATCCCGAAAAGATCAAGCTGTACTTCGAGAACAACGGCAAGCT |
| | | GCTGTCTGGATGGTCCGATAGTCAGACCGAGTACGACAACGGGACACAGTACG |
| | | GCGGCTATATCTTTAGGAAGAAGAACGAGATCGGGGAGTACGACTTCTACCTG |
| | | GGCATTTCCGCCGACGCCAAGCTGTTCAGAAGGGATGAAACAATCTGTTACGA |
| | | AGACGGAATGTACGAACGCCTGGACTATTATAATCTGAAACCGAACACCCTGC |
| | | TGGGCAATAGCTACATCGGGAACTACGGCGAGGATTCGAACGCTGTGCTGAGC |
| | | GCCTTTAACGATGCCGTGACCAAGCTACACCTGGAGAAGAAACTGGTGCCCAA |
| | | AGACAACGAGAAGGTGCCAACTTATCTGAAGAGGCTGAAGCAGGATTATGCTA |
| | | ACTTCTACCAAATCCTGATGAACGATAATAACGTGGTGGATGCCTATAAGAGC |
| | | ATGAAGCAGCATATCCTGGCCACACTGGCCTCACTGATTAGAGTGCCCGCCGCT |
| | | ATCGAGCTGACTACACAGACCAATCTGGATATTGACAAGCTCATCGACGAAAT |
| | | TATCAATCTGCCTAGCGAGAGCTTCGGGTACTTCCCAGTGGCCACCGCAGCGAT |
| | | CGAGGAGGCCAACAATCGGGAGAAAAAGCCTCTCTTCCTGTTTAAAATGTCCA |
| | | ATAAAGATCTGTCCTATGCCGAAAAGTTTTCCAAGGGCGACCGGAAATCCCGC |
| | | GGCACCGAAAACCTGCACACAATGTACCTGAAGGCCCTGCTGGGAATGACACA |
| | | GAACGTGTTCTCCATCGGATCCGGCATGGTGTTTTTCCGGCACAACACTGAGGG |
| | | TCTGGCAGAGACCACAGCACGGCACAAGGCCAATGAGTTCATTGCTAACAAGA |
| | | ATAAGCTGAACGACAAGAAGAAGTCCATCTTTGACTATGAGATCGTTAAGAAC |
| | | AAAAGGTTCACTGTGGACAAATACCTGTTCCACCTGTCACTGAAACTGAACTAC |
| | | ACCCAGCCCAATAAGTTTGACATTAACAGCAAGGTGCGGGAGATCATCCGGAA |
| | | CGGGGGAATCAAGCACATCATTGGAATCGATAGAGGCGAGAGAAACCTGATCT |
| | | ATCTGTCCCTGATCGACATGGAGGGGAATATCGTGATGCAGAAATCCCTGAAT |
| | | ATCCTGAAAGACGACCACAATGCCAAGGGAACCGACTACAAGGGACTGCTGAC |
| | | CGAGAGGGAGGGGGAGAATAAGGAGGCTCGGAGAAACTGGAAAAAGATCGCC |
| | | AACATCAAGGATCTGAAAAGAGGCTACCTGTCCCAGGTGGTGCATATTATCAG |
| | | CAAGATGATGGTCGAGTATAATGCCATTGTGGTGCTGGAGGACCTGAACCCAG |
| | | GCTTCATCAGGGGACGGCAGAAAATTGAAAGAAACGTGTACGAGCAGTTTGAG |
| | | CGTATGCTGATCGATAAGCTGAATTTCTACGTGGACAAGCACAAGGACGCCAA |
| | | TGAGACAGGAGGGCTGCTGCATGCCCTGCAGCTGACAAGCGAATTCAAAAACT |
| | | TCAAGAAGTCTGAACACCAAAACGGCTGCCTGTTCTACATCCCTGCCTGGAACA |
| | | CATCCAAGATCGACCCAGCCACAGGCTTCGTGAATCTGTTCGATACCAGGTACA |
| | | CTAACGCCGAGAAGGCCCTGGAGTTCTTCAGAAAATTCGACGCAATCCGATAC |
| | | AACGAGGAAAAAGATTGGTTCGAGTTCGAATTTGACTATGACGAGTTTACTCA |
| | | GAAGGCTCACGGCACACGCACCAGGTGGACCCTGTGCACCCACGGAAAACGCC |
| | | TGAGGTCCTTCCGGAACCCAGCCAAGCAGTACAACTGGGACAGCGAAGTGGTG |
| | | GCCCTGACTGACGAGTTTAAGAGGATCCTGGGCGAGGCAGGAATTGATATCCA |
| | | CGAGAATCTGAAGGACGCCATCCGGAATCTGGAAGGGAAGCGCCGCAAGTACC |
| | | TGGAACCTCTGATGCAGTTTATGAAACTGCTGCTGCAGCTGAGGAATTCACGCA |
| | | AGAATCCTGAGGAAGACTATATTCTGAGCCCCGTGGCCGACGAAAATGGGGTG |
| | | TTTTACGATAGCAGGAGCTGCGGGGATACCCTGCCCAAAAACGCCGACGCCAA |
| | | CGGAGCTTATAATATCGCTAGGAAGGGCCTGATGCTGATCAGGCAGATCAAGG |
| | | AAGCTAAGGAGCTGGGCAAGGTGAAATATGATATCTCCAACAAGGCCTGGCTG |
| | | AACTTTGCCCAGCAGAAGCCATACAAGAACGAGTGA |

TABLE S7C
Direct Repeat Group 7

| SEQ | | SEQ | |
|---|---|---|---|
| ID NO | Direct Repeat (Variant #1) | ID NO | Direct Repeat (Variant #2) |
| 106 | ATCTACAATAGTAGAAATTATTAG | 107 | ATCTACAATAGTAGAAATTATTAGA |
| | AGCTTACTAGCC | | GCTTACTAGCC |
| 108 | GGCTAGTATGCTTCAATAATTTCTA | 109 | GGCTAGTATGCTTCAATAATTTCTA |
| | CTATTGTAGAT | | CTATTGTAGAT |
| 110 | ATCTACGATAGTAGAAATTATCAA | 111 | ATCTACGATAGTAGAAATTATCAAG |
| | GTCCGTATAGAC | | TCC |

TABLE S7D
crRNA Sequences Group 7

| SEQ | | |
|---|---|---|
| ID | | |
| NO | Sequence | FIG |
| 112 | GGCUAGUAAGCUCUAAUAAUUUCUACUAUUGUAGAU | FIG. 7A |
| 113 | GGCUAGUAUGCUUCAAUAAUUUCUACUAUUGUAGAU | FIG. 7B |
| 114 | GUCUAUACGGACUUGAUAAUUUCUACUAUCGUAGAU | FIG. 7C |

### Group 8 Sequences (SEQ ID Nos: 118-130)

TABLE S8A
Enzyme Sequences Group 8

| SEQ | |
|---|---|
| ID | |
| NO | Sequence |
| 118 | MNSIEQFTGLYSLSKTLRFELKPIGKTQENIEKNGILERDNERAVAYKSVKKYIDEYHKAFI |
| | ERVMNSFPHNLSDEEQDIWEEALNNYYTSYHLPATNPQRKETLTEAQDTLRTLISNSFLRD |
| | RQYKRLFGKELFQEDLAEFVNTALFETYIRSQKGNNNLTEEEVRQIQENTIREISLFRNFTV |
| | YFSGYNENRKNMYVADDKATSIANRMITENLPKFVDNMEVFGKIAASEVANHFETLYKS |
| | MEAYLNVISIDEMFKLDYYPILLTQKQIDVYNTIIGGKVLEDGSKIQGLNEYVNLYNQQQK |
| | DKANRLPKLKPLFKQILSEHNAISWLPDTFSTDNEMLESIEKCYQNLRTQVFEGEISLKKLL |
| | DNLGDYDLEHIYIPNDLQLTNIVQKVYGDWSMVKKAMEEDVKAKNPQRKNETGEKYEE |
| | RIVKILKSDESFSIAQINNLLKPYLGEKYVPLEKYFITKGAEDNNNVQKPNLFIRIENAYIEA |
| | KSLLNTQYPKDRTMSQDKQNVERIKILLDAIKDLQHFVKPLLGKGSEGQKDNTFYGEFIPL |
| | WEALDQITPLYNMVRNRMTQKPYSDDKIKLFFENNGSFLNGWVDSKTESDNATQYGGY |
| | LFRRKNSIGEYDYYLGISSATKLFRSFNHVSESDKSIFERLDYYQLKGKTFYGALYKGDYE |
| | KESSAIKLAIDKFITNNGNTIIREKINTEKRKRQPKVSTAIGYLKFLRQQGVELFDSLLKDGC |
| | FEESNQAMITSIKATLASMARIPNAQDYAHKDYSLFSDAMDDVEELLQDVIFSYFPISQKE |
| | MDKVLEREEKPMYLFKITNKDLSFAETHEKGLRKSRGTDNLHTMYFKALMSGTQNVFDI |
| | GSGTVFFRERKIVYSEEQLGKGHHHEMLKDKFDYPIISNKRYAYDKFQFHLSININYKADK |
| | HKDINLLVNEYLKESKVTHIIGIDRGERHLLYLSVIDLQGNIVEQYSLNEIVNEYNDCNYRT |
| | NYHDLLDIREKQRDEARRSWLTIESIKELKEGYMSQVVHLIAQLIVKYNAIVVLEDLNTGF |
| | IRGRQKVEKQVYQKFEKMLIDKLNYLVDKKKDIYDLGGALNALQLTNKFESFQKIGKQC |
| | GFLFYVPAWNTSKMDPTTGFVNMLDTRYENMDKAKAFFAKFRSIRQNVSKGWFEFAIDY |
| | NDFTSKAAGTKTQWTLCTYGTRIETKRDTKQNNNFVSDEFDLTDKFKVLFNKYNIDVNG |
| | NLMEQICSQNDATFFKELLHMLHLTLQMRNSITGTEVDYLISPVMNASGKFYDSRTCENN |
| | LPKNADANGAYNIARKGLWIVEQIKHSDNISKLKIAISNKEWLRYTQGLVD |
| 119 | MNDLSQFTNLYSLSKTLRFELKPIGKTLENIEKNGILERDNRRSIGYKSIKKVIDEYHKAFID |
| | RVLNDYERKLDETGRIVWRDSLNELYRLYHLSSTEAKRNEEIRKTQEILRKQISECFKKDR |
| | QYSRLFGKELIREDLTEFVNTPLFEQYILSQKGNEDLSIDDVRHIQEDVIEDIAQFRDFTTYF |
| | SGFYENRRNMYVADDKATSIANRLIMENLPKFIDNIDVFERIAQSEVSGNLETLCKEMEAY |
| | LNVNSIAEIFCLDYFSMVLTQKQIDVYNAIIGGMSLEDGTKIKGLNVYVNLYNKKQKEKT |
| | CRLPKLKPLFKQILSERNAISWLPDEFTSDKELLESIEKCYQDLKNSVFEGKDSLMVLLKEL |
| | GEYDLEHIYLHNDSQLTNIAQKQYGDWATIKRAFEESVKAATPAKRNETTEKYAARIEKI |
| | LKATDSLSLSQINRMLKAYMGDDFKTIESYFTAMGAEDTVDGQKPNLFIRIENAYADVQP |
| | LLNTPYPEDKKLSQDKANVAKIKNLLDTIKDLLHFVKPLLGNGTKGEKDNRFYGEFIPLW |
| | ELLDQITPLYNMVRNRLTKKECSDEKIKLFFENNNGRFLSGWTDNQTESDNGTQYGGYLF |
| | RKRNGIGEYDYYLGVSDAKKLFRSFKSVPDSDKSDYERLDYYQLKGKTFYGALYKGDYE |
| | SESANIKRSIDYFISHNGNSEIKGKINTERRKQQPRISTAIGYLKFIRQHDFGLYKLLLQDAE |
| | FEKSNQEMIASIRETLLSLVRIPSAHEYADKTYTLFSNMMDDVEILLKSKVFSYFTVSQSEL |
| | DEVLVREEKPLYLFKITNKDLSYAETHEKGLRKTRGTDNLHTLYFKALMSGNQSVFDIGS |
| | GAIFFREKKINYTDEQMRKGHHHEMLKDKFNYPIISNKRYAFDKFQFHLSISINYNADKNK |
| | DINPMVNAYLKESNSTHIIGIDRGERHLLYLSLIDLQGDIVEQYTLNEIGNTNYHDLLGIKE |
| | KQRKEARPNWMEIENIRELKEGYMSQVIHIIAQLMVKYNAIVVLEDLNMGFMRGRQKVE |
| | KQVYQKFEKMLIDKLNYLVDKQCNATELGGVLNAYQLTNTHKKFLEQYGNQKNALGK |
| | QCGFIFYIPAWNTSKMDPTTGFVNLLDTHYENMEKAKAFFGKFKSIRNNAAKGWFEFEFD |
| | YDNFTTKAADTRTPWTLYTHGTRIETKRDPKQKNNFVSEEFDLTSKFKELFVKYKIDLND |
| | NLMEQICLQNDASFFKELLHLLQLTLQMRNSKIGTDVDYLISPVMNDKGKFYDSRNCGK |
| | NLPENADANGAYNIARKGLWIIDQIKRTDDLSRLRLAISNKEWLQYAQKMV |

TABLE S8B
Human Codon Optimized Nucleotide Sequences Group 8

| SEQ | Corres- | |
|---|---|---|
| ID | ponding | |
| NO | AA | Sequence |
| 120 | 118 | ATGAACTCGATCGAACAATTTACCGGTCTATATTCTCTCTCAAAAACGCTGCG |
| | | ATTTGAACTGAAACCCATTGGAAAGACCCAAGAAAACATCGAGAAGAACGG |
| | | AATCCTGGAGCGCGACAATGAGCGGGCCGTAGCGTACAAATCAGTGAAAAA |
| | | GTACATTGACGAATACCATAAGGCGTTCATCGAAAGGGTTATGAATAGCTTC |
| | | CCTCACAATTTAAGCGACGAAGAACAGGACATCTGGGAGGAAGCTCTAAAT |
| | | AACTATTACACAAGCTACCACCTGCCCGCGACAAACCCTCAGCGGAAAGAG |
| | | ACGTTGACCGAAGCTCAAGATACATTGCGTACCCTGATATCAAATTCTTTCCT |
| | | TCGCGATAGACAGTACAAACGGCTCTTCGGGAAAGAGCTGTTCCAGGAGGA |
| | | CCTTGCTGAGTTCGTGAATACAGCCCTGTTCGAAACCTACATCAGGTCACAG |
| | | AAAGGGAATAACAATCTCACCGAGGAGGAAGTGCGGCAGATCCAGGAGAAT |
| | | ACTATACGGGAGATATCCCTGTTTAGGAACTTCACCGTTTACTTTTCTGGGTA |
| | | TAATGAGAACAGAAAGAATATGTACGTGGCCGACGATAAGGCTACAAGCAT |
| | | TGCCAATAGAATGATAACCGAGAACTTACCAAAATTCGTGGACAACATGGA |
| | | AGTTTTCGGCAAAATCGCCGCCAGCGAAGTGGCTAATCACTTCGAGACTTTG |
| | | TACAAGAGCATGGAGGCTTATCTGAACGTGATTTCCATTGACGAGATGTTTA |
| | | AACTGGACTATTACCCAATCCTTCTAACGCAGAAGCAAATTGACGTGTATAA |
| | | CACCATCATCGGAGGTAAGGTGTTGGAGGACGGTTCAAAAATCCAGGGCCTG |
| | | AATGAATACGTGAACCTGTATAATCAGCAACAGAAGGACAAGGCTAATAGA |
| | | CTCCCTAAGCTTAAACCACTGTTTAAGCAGATTCTTAGCGAACATAATGCAA |
| | | TCAGTTGGCTGCCTGACACATTTTCTACAGATAATGAGATGCTAGAGAGCAT |
| | | AGAAAAGTGCTACCAGAACTTAAGGACTCAGGTGTTCGAGGGGGAAATCTCT |
| | | CTCAAAAAACTTCTAGACAACCTCGGGGATTACGACCTGGAGCATATTTACA |
| | | TTCCAAATGACTTACAGCTGACGAACATTGTGCAGAAGGTCTACGGAGACTG |
| | | GTCCATGGTGAAGAAGGCGATGGAGGAAGATGTAAAGGCTAAGAACCCACA |
| | | ACGAAAGAATGAAACTGGGGAAAAATACGAGGAGAGAATTGTCAAGATTCT |
| | | GAAAAGCGATGAATCTTTCTCCATTGCACAAATTAACAACCTGCTAAAGCCC |
| | | TATCTGGGGGAAAAGTATGTGCCGCTCGAGAAGTATTTTATTACAAAGGGCG |
| | | CAGAGGACAACAACAACGTGCAGAAGCCGAACCTGTTCATCCGGATCGAAA |
| | | ATGCCTATATCGAAGCTAAGAGCTTACTGAATACTCAATATCCCAAAGACCG |
| | | CACAATGAGTCAGGACAAGCAAAATGTTGAACGTATCAAAATCCTCCTGGAT |
| | | GCAATCAAGGATCTGCAGCATTTTGTTAAACCCCTGCTCGGGAAGGGAAGCG |
| | | AGGGACAGAAAGATAATACCTTTTATGGGGAGTTTATCCCCCTGTGGGAGGC |
| | | CCTGGATCAGATAACGCCCCTTTACAATATGGTCCGCAATAGGATGACCCAG |
| | | AAGCCATACAGTGACGATAAAATAAAGCTCTTCTTCGAGAATAACGGCTCGT |
| | | TTCTTAACGGCTGGGTGGACTCGAAAACTGAGTCCGATAACGCTACTCAGTA |
| | | CGGCGGATACTTGTTTCGGCGCAAGAACTCCATAGGCGAGTACGATTATTAT |
| | | CTCGGCATCAGCTCAGCCACAAAATTATTCCGATCCTTCAACCATGTTAGCG |
| | | AAAGTGACAAGAGTATTTTTGAACGGCTGGACTACTATCAATTAAAAGGGAA |
| | | GACCTTCTATGGCGCACTGTACAAAGGTGACTACGAAAAAGAATCATCGGCA |
| | | ATCAAACTCGCCATAGACAAGTTCATCACAAATAACGGCAATACCATCATCA |
| | | GGGAAAAGATAAACACAGAGAAGCGAAAAAGACAGCCTAAGGTCAGTACC |
| | | GCCATTGGGTATTTGAAGTTTCTGCGGCAACAGGGTGTTGAGCTATTTGACA |
| | | GTCTACTGAAAGATGGCTGTTTTGAAGAGAGTAACCAGGCAATGATCACTTC |
| | | TATCAAGGCCACTCTTGCCTCTATGGCCAGAATTCCTAACGCCCAGGATTAC |
| | | GCTCACAAAGATTACTCATTATTCTCAGACGCTATGGACGATGTGGAGGAGC |
| | | TGCTGCAGGATGTTATCTTCTCCTACTTCCCCATCTCCCAAAAGGAAATGGAC |
| | | AAAGTGTTGGAAAGGGAAGAGAAGCCTATGTACCTTTTTAAGATCACCAACA |
| | | AGGATCTGTCCTTCGCCGAGACGCATGAGAAAGGATTAAGGAAAAGTCGGG |
| | | GTACTGACAACCTCCATACAATGTATTTCAAAGCACTCATGTCCGGAACCCA |
| | | AAACGTCTTTGATATAGGCTCCGGCACCGTGTTTTTCAGAGAGCGGAAGATT |
| | | GTCTATAGCGAGGAGCAACTGGGTAAGGGACATCATCACGAGATGCTCAAG |
| | | GACAAATTCGACTACCCTATTATCTCTAACAAGCGCTATGCATACGATAAGT |
| | | TTCAGTTCCACCTCTCCATTAACATCAACTATAAGGCAGACAAACACAAGGA |
| | | TATTAACCTCCTTGTAAACGAATATCTCAAGGAGAGTAAAGTCACTCACATC |
| | | ATCGGGATTGACAGAGGGGAGAGGCACCTTTTGTATTTGTCCGTCATTGATC |
| | | TCCAGGGTAATATTGTTGAACAATACTCTCTCAACGAGATCGTGAATGAGTA |
| | | CAACGACTGCAATTATAGAACCAATTACCATGATCTGCTGGATATCCGCGAA |
| | | AAACAGAGGGACGAGGCACGACGCTCTTGGTTGACCATAGAGTCAATTAAA |
| | | GAGCTCAAGGAGGGCTATATGAGCCAGGTAGTTCACCTTATCGCGCAGCTTA |
| | | TTGTGAAATATAATGCTATCGTCGTGCTGGAAGATCTCAACACTGGTTTTATT |
| | | CGTGGAAGACAGAAGGTGGAAAAGCAGGTGTACCAGAAGTTTGAGAAAATG |
| | | CTGATAGATAAGCTGAATTATCTGGTCGATAAGAAGAAAGATATCTACGATC |
| | | TCGGGGGTGCACTGAATGCCTTGCAGTTGACCAACAAGTTCGAAAGCTTCCA |
| | | GAAAATAGGCAAGCAGTGTGGCTTCCTGTTTTACGTACCAGCCTGGAATACC |
| | | TCTAAAATGGACCCGACAACCGGATTTGTAAACATGTTGGATACACGGTACG |
| | | AAAATATGGATAAGGCCAAAGCGTTCTTTGCCAAGTTTAGATCAATTAGGCA |
| | | GAACGTATCTAAAGGCTGGTTCGAATTTGCCATTGACTACAACGATTTTACTA |
| | | GCAAAGCCGCAGGCACTAAAACACAGTGGACGCTTTGTACATATGGAACTCG |
| | | TATTGAGACAAAGCGTGATACCAAGCAGAATAATAATTTCGTGTCTGACGAG |
| | | TTTGACTTGACCGATAAGTTCAAAGTGCTGTTCAACAAGTACAATATCGATG |
| | | TCAACGGAAACTTGATGGAACAAATCTGCAGCCAGAACGACGCAACGTTTTT |
| | | TAAGGAGCTGCTGCACATGCTGCACCTGACATTACAAATGCGCAACTCCATT |
| | | ACCGGGACTGAGGTCGATTATCTCATAAGCCCAGTCATGAACGCTTCAGGCA |
| | | AATTCTATGACAGTCGAACCTGCGAAAATAATTTGCCCAAGAACGCTGACGC |
| | | CAATGGAGCGTACAATATCGCCAGGAAAGGCCTGTGGATCGTGGAGCAGAT |
| | | TAAACACTCCGACAATATCTCCAAACTGAAGATTGCTATATCTAATAAGGAG |
| | | TGGCTTCGCTATACTCAGGGACTCGTCGATTGA |
| 121 | 119 | ATGAACGACCTGTCCCAGTTTACAAACCTGTATTCACTGAGCAAGACACTGA |
| | | GGTTTGAACTGAAGCCCATCGGGAAGACCCTGGAGAACATTGAAAAGAACG |
| | | GCATACTGGAGAGGGACAATAGACGATCTATCGGCTATAAGAGCATCAAGA |
| | | AGGTGATCGACGAGTACCACAAAGCCTTCATCGACAGAGTGCTGAACGATTA |
| | | CGAAAGGAAGCTGGACGAAACCGGTAGGATTGTGTGGAGGGATAGCCTGAA |
| | | CGAGCTCTACAGACTGTATCACCTGAGCAGCACCGAGGCCAAACGCAATGA |
| | | GGAGATTCGGAAGACTCAGGAGATTCTGAGGAAACAGATCAGCGAGTGCTT |
| | | TAAGAAGGACAGGCAGTATTCTAGACTGTTCGGCAAGGAGCTGATCAGAGA |
| | | GGACTTGACCGAGTTTGTGAACACACCACTGTTTGAGCAGTACATTCTGAGC |
| | | CAGAAGGGCAACGAGGATCTGTCAATTGACGACGTGAGACATATCCAGGAG |
| | | GACGTGATTGAGGACATTGCCCAGTTTCGCGACTTTACCACGTATTTTTCCGG |
| | | CTTCTATGAGAACAGACGCAACATGTACGTGGCCGATGATAAGGCTACCTCC |
| | | ATCGCCAATCGGTTGATTATGGAGAACCTGCCTAAGTTCATTGATAACATCG |
| | | ACGTGTTCGAAAGAATCGCCCAGTCTGAAGTGTCTGGCAACCTGGAGACACT |
| | | GTGCAAGGAGATGGAGGCCTACCTGAATGTGAATAGCATCGCCGAGATTTTC |
| | | TGTCTGGACTACTTCAGTATGGTGCTGACACAGAAACAGATCGACGTGTACA |
| | | ATGCAATTATCGGAGGAATGTCACTGGAGGACGGGACCAAAATCAAAGGCC |
| | | TGAACGTGTATGTGAATTTGTACAACAAGAAGCAGAAGGAGAAGACATGCA |
| | | GACTGCCCAAACTTAAGCCACTGTTTAAACAGATCCTGTCAGAGAGGAACGC |
| | | CATCAGCTGGCTGCCCGACGAATTTACAAGTGACAAAGAGCTGCTGGAGTCA |
| | | ATCGAGAAGTGCTACCAGGATCTGAAGAACAGTGTGTTTGAAGGCAAAGAC |
| | | AGCCTGATGGTCCTGCTCAAGGAGCTGGGGGAGTATGACCTGGAGCATATCT |
| | | ACCTGCATAATGACAGCCAGCTGACTAACATTGCCCAGAAGCAGTACGGCGA |
| | | CTGGGCCACCATCAAGAGGGCTTTCGAGGAGAGTGTGAAGGCCGCAACCCCT |
| | | GCCAAACGGAACGAGACCACCGAAAAGTACGCTGCCAGGATTGAGAAGATT |
| | | CTGAAAGCCACCGATTCCCTGAGCCTGAGCCAGATCAACAGGATGCTGAAGG |
| | | CCTACATGGGCGACGACTTCAAGACCATTGAGAGCTACTTCACCGCCATGGG |
| | | AGCCGAGGATACCGTGGATGGCCAGAAACCAAACCTGTTTATCCGGATCGAG |
| | | AACGCCTACGCCGACGTCCAGCCTCTGCTTAATACCCCTTACCCAGAGGACA |
| | | AAAAGCTGTCCCAGGATAAGGCCAATGTGGCCAAAATCAAGAATCTCCTGG |
| | | ACACTATCAAGGACCTGCTGCACTTCGTGAAACCCCTGCTGGGCAATGGCAC |
| | | AAAGGGGGAGAAAGACAACCGCTTCTACGGAGAGTTCATTCCCCTGTGGGA |
| | | GCTGCTGGACCAGATCACCCCCCTGTACAACATGGTGCGCAATAGACTGACA |
| | | AAGAAGGAGTGCTCCGACGAGAAAATCAAGCTGTTCTTTGAGAACAATAAT |
| | | GGCAGGTTCCTGAGCGGCTGGACCGACAACCAGACCGAGAGCGACAATGGG |
| | | ACACAGTATGGCGGCTACCTGTTTAGAAAGAGGAATGGAATCGGTGAGTAC |
| | | GACTACTATCTGGGCGTGAGCGATGCCAAGAAGCTGTTCAGATCCTTTAAGT |
| | | CTGTGCCAGATTCCGATAAGTCCGATTATGAGAGGCTGGACTACTACCAGCT |
| | | GAAAGGCAAAACTTTTTACGGCGCCCTGTATAAGGGGGACTATGAAAGCGA |
| | | GTCAGCCAATATCAAGCGGAGCATCGATTATTTCATCAGTCACAACGGGAAT |
| | | AGCGAGATCAAAGGCAAGATTAATACCGAGCGGCGTAAACAGCAGCCTAGG |
| | | ATCTCCACCGCCATCGGATACCTGAAGTTTATTAGGCAGCACGACTTTGGCCT |
| | | GTATAAGCTGCTGCTGCAGGACGCCGAGTTTGAGAAGAGTAACCAGGAAAT |
| | | GATCGCTTCCATCAGGGAGACCCTGCTCTCCCTGGTGAGGATCCCCTCTGCTC |
| | | ACGAGTATGCCGACAAGACCTATACCCTGTTTAGCAACATGATGGACGATGT |
| | | GGAGATCCTGCTGAAAAGTAAAGTGTTCAGCTATTTCACAGTGTCTCAGAGC |
| | | GAGCTGGACGAGGTGCTGGTGAGAGAGGAGAAGCCTTTGTACCTGTTCAAG |
| | | ATCACCAATAAGGACCTGAGCTACGCCGAGACTCATGAAAAAGGCCTTAGG |
| | | AAGACTCGCGGGACAGATAACCTGCACACCCTGTACTTTAAGGCCCTCATGA |
| | | GCGGGAACCAATCCGTCTTCGATATTGGCAGCGGAGCCATTTTCTTCAGGGA |
| | | GAAGAAGATTAATTACACCGACGAACAGATGCGGAAAGGGCACCACCACGA |
| | | GATGCTCAAAGACAAGTTCAATTACCCTATCATTAGTAACAAAAGGTACGCC |
| | | TTCGACAAATTCCAGTTTCACCTGTCAATCAGCATTAACTACAACGCCGATA |
| | | AGAACAAGGATATTAACCCCATGGTGAATGCTTACCTGAAGGAGTCAAACTC |
| | | CACACACATCATTGGGATTGATAGGGGCGAGAGGCATCTGCTGTACCTGAGC |
| | | CTGATTGATCTCCAGGGGGATATCGTCGAGCAGTACACTCTGAACGAGATCG |
| | | GCAACACAAACTACCACGACCTGCTGGGCATCAAGGAGAAGCAGAGGAAGG |
| | | AGGCCAGGCCCAATTGGATGGAGATCGAGAACATCCGCGAGCTGAAGGAGG |
| | | GGTACATGAGCCAGGTGATCCACATTATCGCTCAGCTGATGGTCAAATACAA |
| | | CGCTATTGTGGTGCTCGAAGACCTGAATATGGGCTTCATGGGGGGCCGGCAG |
| | | AAGGTGGAAAAACAGGTGTATCAGAAATTCGAAAAGATGCTGATCGACAAG |
| | | CTGAATTACCTGGTGGATAAGCAGTGTAATGCCACCGAGCTGGGTGGGGTGC |
| | | TGAATGCTTACCAGCTGACCAATACACACAAGAAGTTCCTGGAGCAGTATGG |
| | | CAATCAGAAAAATGCGCTGGGTAAGCAATGCGGCTTCATCTTCTACATCCCC |
| | | GCTTGGAACACTAGCAAGATGGACCCCACCACAGGCTTCGTGAATCTGCTGG |
| | | ATACCCATTATGAGAACATGGAGAAAGCCAAAGCCTTCTTCGGGAAATTCAA |
| | | GAGCATCAGAAATAACGCCGCCAAGGGATGGTTTGAGTTCGAGTTCGACTAC |
| | | GATAACTTCACCACCAAGGCCGCCGATACAAGAACTCCTTGGACCCTGTATA |
| | | CCCATGGGACCAGAATTGAGACTAAGAGGGACCCTAAGCAGAAGAATAACT |
| | | TCGTGAGCGAGGAGTTCGACCTGACCAGCAAATTCAAGGAGCTGTTTGTGAA |
| | | ATACAAGATCGATCTGAATGATAATCTGATGGAGCAGATCTGCCTGCAGAAC |
| | | GACGCCTCATTCTTTAAAGAGCTGCTGCACCTGCTGCAGCTGACCCTGCAGA |
| | | TGAGAAACAGCAAGATTGGCACCGATGTGGATTACCTGATCAGTCCAGTGAT |
| | | GAACGATAAGGGGAAATTCTATGACTCCCGCAATTGTGGGAAGAATCTGCCA |
| | | GAGAATGCTGATGCCAATGGCGCCTATAATATCGCCAGAAAGGGACTGTGG |
| | | ATTATTGATCAGATTAAACGCACCGATGACCTGTCAAGGCTGAGACTGGCCA |
| | | TCTCTAACAAAGAGTGGCTGCAGTACGCCCAGAAAATGGTGTGA |

TABLE S8C
Direct Repeat Group 8

| SEQ | | SEQ | |
|---|---|---|---|
| ID NO | Direct Repeat (Variant #1) | ID NO | Direct Repeat (Variant #2) |
| 122 | GGCTATAGGCCAAACATAATTTCT | 123 | GGCTATAGGCCAAACATAATTTCTA |
| | ACTATTGTAGAT | | CTATTGTAGAT |
| 124 | ATCTACAATAGTAGAAATTATGTG | 125 | ATCTACAATAGTAGAAATTATGTGT |
| | TGGTTTTACACC | | GGTTTTACACC |

TABLE S8D
crRNA Sequences Group 8

| SEQ | | |
|---|---|---|
| ID | | |
| NO | Sequence | FIG |
| 126 | GGCUAUAGGCCAAACAUAAUUUCUACUAUUGUAGAU | FIG. 8A |
| 127 | GGUGUAAAACCACACAUAAUUUCUACUAUUGUAGAU | FIG. 8B |

TABLE S8E
Consensus Sequence Group 8

| SEQ | |
|---|---|
| ID | |
| NO | Consensus Sequence |
| 128 | MNXJXQFTXLYSLSKTLRFELKPIGKTXENIEKNGILERDNX |
| | RXXXYKSXKKXIDEYHKAFIXRVXNXXXXXLXXXXXXXWXXX |
| | LNXXYXXYHLXXTXXXRXEXJXXXQXXLRXXISXXFXXDRQY |
| | XRLFGKELXXEDLXEFVNTXLFEXYIXSQKGNXBLXXXXVRX |
| | IQEBXIXXIXXFRBFTXYFSGXXENRXNMYVADDKATSIANR |
| | XIXENLPKFXDNXXVFXXIAXSEVXXXXETLXKXMEAYLNVX |
| | SIXEXFXLDYXXXXLTQKQIDVYNXIIGGXXLEDGXKIXGLN |
| | XYVNLYNXXQKXKXXRLPKLKPLFKQILSEXNAISWLPDXFX |
| | XDXEXLESIEKCYQBLXXXVFEGXXSLXXLLXXLGXYDLEHI |
| | YJXNDXQLTNIXQKXYGDWXXXKXAXEEXVKAXXPXXXNETX |
| | EKYXXRIXKILKXXXSXSJXQINXXLKXYXGXXXXXJEXYFX |
| | XXGAEDXXBXQKPNLFIRIENAYXXXXXLLNTXYPXDXXXSQ |
| | DKXNVXXIKXLLDXIKDLXHFVKPLLGXGXXGZKDNXFYGEF |
| | IPLWEXLDQITPLYNMVRNRXTXKXXSDXKIKLFFEXNNGXF |
| | LXGWXDXXTESDNXTQYGGYLFRXXNXIGEYDYYLGXSXAXK |
| | LFRSFXXVXXSDKSXXERLDYYQLKGKTFYGALYKGDYEXES |
| | XXIKXXIDXFIXXNGNXXIXXKINTEXRKXQPXXSTAIGYLK |
| | FJRQXXXXLXXXLLXDXXFEXSNQXMIXSIXXTLXSXXRIPX |
| | AXXYAXKXYXLFSBXMDDVEXLLXXXXFSYFXXSQXEXDXVL |
| | XREEKPXYLFKITNKDLSXAETHEKGLRKXRGTDNLHTXYFK |
| | ALMSGXQXVFDIGSGXXFFREXKIXYXXEQXXKGHHHEMLKD |
| | KFBYPIISNKRYAXDKFQFHLSIXINYXADKXKDINXXVNXY |
| | LKESXXTHIIGIDRGERHLLYLSXIDLQGBIVEQYXLNEIXN |
| | XXXXXXXXTNYHDLLXIXEKQRXEARXXWXXIEXIXELKEGY |
| | MSQVXHJIAQLXVKYNAIVVLEDLNXGFXRGRQKVEKQVYQK |
| | FEKMLIDKLNYLVDKXXBXXXLGGXLNAXQLTNXXXXFXXXX |
| | XXXXXXJGKQCGFJFYXPAWNTSKMDPTTGFVNXLDTXYENM |
| | XKAKAFFXKFXSIRXNXXKGWFEFXXDYBBFTXKAAXTXTXW |
| | TLXTXGTRIETKRDXKQXNNFVSXEFDLTXKFKXLFXKYXID |
| | XNXNLMEQICXQNDAXFFKELLHXLXLTLQMRNSXXGTXVDY |
| | LISPVMNXXGKFYDSRXCXXNLPXNADANGAYNIARKGLWIX |
| | XQIKXXDBJSXLXJAISNKEWLXYXQXXVD |

Wherein: each X is independently selected from any naturally occurring amino acid.

TABLE S8F
Native Nucleotide Sequences Group 8

| SEQ | | |
|---|---|---|
| ID | Corresponding | |
| NO | AA | Sequence |
| 129 | 118 | ATGAATTCCATTGAACAATTCACCGGATTATACTCCTTATCAAAGACCTTGCG |
| | | CTTTGAGTTGAAACCTATAGGAAAAACGCAAGAAAACATAGAAAAAAACGG |
| | | TATTCTTGAAAGAGACAACGAGAGAGCTGTTGCGTACAAAAGTGTAAAGAA |
| | | ATACATCGACGAGTATCACAAGGCATTTATTGAAAGGGTTATGAATTCTTTTC |
| | | CCCACAATTTAAGCGATGAGGAGCAAGATATTTGGGAAGAAGCGTTGAATA |
| | | ACTATTATACATCATACCATTTACCTGCAACTAATCCTCAAAGAAAGGAAAC |
| | | GTTAACAGAAGCCCAGGATACTTTACGAACTCTTATTTCTAATAGTTTTCTTA |
| | | GGGATAGACAGTACAAAAGACTATTTGGAAAAGAACTGTTTCAAGAGGATTT |
| | | GGCGGAATTTGTAAATACTGCCCTTTTTGAAACTTATATCCGTTCTCAAAAAG |
| | | GTAATAATAACTTGACCGAGGAAGAAGTCCGTCAGATACAAGAGAATACAA |
| | | TCAGGGAGATCTCGCTCTTCAGAAACTTTACCGTCTATTTTTCGGGTTATAAC |
| | | GAGAATAGGAAAAATATGTATGTTGCAGATGACAAGGCAACTTCTATTGCCA |
| | | ACCGCATGATTACAGAGAATCTTCCTAAGTTTGTCGACAACATGGAGGTGTT |
| | | TGGGAAAATTGCCGCTAGTGAAGTCGCAAATCATTTCGAAACTCTTTACAAG |
| | | TCAATGGAAGCTTATTTAAATGTCATATCTATTGACGAAATGTTCAAGTTGGA |
| | | TTATTATCCAATATTGCTGACGCAAAAACAAATAGATGTATACAATACAATA |
| | | ATTGGAGGAAAGGTGTTGGAGGATGGGAGTAAAATACAAGGCTTGAATGAA |
| | | TATGTGAATCTTTACAACCAACAGCAAAAAGACAAGGCGAATAGACTCCCTA |
| | | AACTAAAACCACTTTTTAAGCAGATACTTAGTGAACACAATGCTATTTCGTG |
| | | GTTGCCCGATACGTTTTCAACTGACAACGAGATGCTGGAAAGCATTGAAAAG |
| | | TGTTATCAGAACCTTAGGACGCAAGTTTTCGAAGGGGAAATTTCATTAAAGA |
| | | AACTCTTGGATAATTTGGGAGATTATGATTTGGAACATATCTATATTCCCAAT |
| | | GACCTCCAATTGACCAATATTGTCCAAAAGGTATATGGAGATTGGTCAATGG |
| | | TCAAGAAGGCAATGGAAGAGGATGTGAAAGCAAAGAATCCCCAAAGGAAA |
| | | AATGAGACAGGCGAAAAGTATGAGGAGAGGATTGTAAAGATACTGAAATCT |
| | | GATGAAAGTTTTTCTATAGCACAAATCAATAACTTGCTGAAACCTTATCTTGG |
| | | AGAAAAATACGTGCCGCTTGAAAAGTATTTTATTACTAAAGGTGCCGAGGAT |
| | | AATAATAATGTGCAAAAACCTAATCTCTTTATTCGTATAGAGAATGCATACA |
| | | TAGAGGCAAAATCTCTGTTGAACACCCAGTATCCAAAAGACAGAACAATGTC |
| | | GCAGGACAAGCAAAATGTTGAGAGAATTAAGATTTTATTGGATGCAATCAAA |
| | | GACTTGCAACACTTTGTAAAACCTTTGTTGGGGAAGGGGTCTGAGGGACAAA |
| | | AAGACAACACCTTCTATGGCGAGTTCATTCCACTTTGGGAAGCACTTGATCA |
| | | AATTACGCCGTTGTACAATATGGTGCGTAACCGAATGACACAGAAGCCTTAT |
| | | TCTGATGATAAAATTAAACTTTTTTTCGAGAACAATGGCTCATTTCTAAATGG |
| | | ATGGGTCGACAGCAAAACAGAATCGGATAATGCTACTCAGTATGGCGGATAT |
| | | TTGTTCAGAAGGAAAAATAGTATCGGCGAATATGATTACTATCTAGGAATCT |
| | | CGTCTGCCACAAAACTTTTCAGAAGTTTTAATCATGTGTCGGAATCGGATAA |
| | | AAGCATTTTTGAAAGATTGGATTATTACCAATTGAAAGGAAAGACTTTTTAT |
| | | GGCGCTTTGTACAAAGGAGACTATGAAAAAGAATCTTCTGCTATCAAGCTGG |
| | | CAATTGATAAATTCATTACTAATAATGGAAATACCATTATTAGAGAAAAGAT |
| | | AAATACTGAGAAAAGAAAACGACAGCCCAAGGTGTCAACTGCCATTGGTTA |
| | | TTTGAAATTTCTCAGACAGCAGGGAGTTGAATTGTTTGATTCTTTATTAAAAG |
| | | ATGGTTGCTTTGAGGAGAGTAATCAAGCTATGATCACTTCCATTAAAGCTAC |
| | | ATTGGCGTCTATGGCGCGCATTCCTAATGCACAGGACTATGCACATAAGGAT |
| | | TATTCATTGTTCTCAGACGCTATGGATGATGTAGAAGAATTGTTGCAAGATGT |
| | | TATTTTTTCATATTTCCCAATTAGTCAGAAAGAGATGGACAAAGTTCTTGAGA |
| | | GAGAAGAAAAGCCCATGTATTTGTTCAAGATAACGAATAAGGATCTTTCTTT |
| | | TGCTGAAACTCACGAAAAGGGGTTGAGGAAATCAAGAGGAACAGATAATTT |
| | | GCACACCATGTACTTCAAAGCATTGATGAGTGGCACTCAAAATGTTTTCGAT |
| | | ATTGGTTCTGGCACCGTTTTCTTTAGAGAACGCAAGATAGTGTATTCTGAAGA |
| | | GCAATTGGGAAAGGGACACCACCACGAAATGCTGAAGGATAAGTTTGATTA |
| | | TCCTATCATATCAAACAAGAGATATGCATACGATAAGTTCCAATTTCATTTGT |
| | | CAATAAATATTAACTATAAAGCAGATAAACATAAAGACATCAATCTTTTGGT |
| | | CAATGAATATCTGAAAGAATCAAAAGTCACGCATATCATTGGTATTGACCGT |
| | | GGAGAAAGACACCTATTATATTTGTCTGTAATAGATTTGCAGGGTAATATCG |
| | | TTGAGCAATATTCATTAAACGAGATTGTGAATGAATATAACGACTGTAATTA |
| | | TCGTACTAACTATCATGATTTATTAGATATCAGAGAAAAGCAAAGGGATGAG |
| | | GCCAGGCGCAGTTGGCTAACCATTGAAAGTATCAAGGAATTAAAGGAGGGC |
| | | TATATGAGCCAGGTGGTTCATTTAATTGCACAACTAATTGTAAAATACAACG |
| | | CAATAGTCGTGCTTGAAGACTTGAATACTGGCTTTATTAGAGGGAGGCAAAA |
| | | GGTTGAGAAACAGGTTTATCAGAAGTTTGAAAAAATGCTGATTGACAAGTTG |
| | | AATTATCTGGTAGACAAGAAAAAAGATATTTACGACCTGGGTGGTGCGTTGA |
| | | ATGCATTGCAGTTGACAAATAAATTTGAGAGTTTTCAGAAGATAGGTAAACA |
| | | ATGTGGTTTCCTGTTCTATGTCCCTGCTTGGAATACCAGTAAAATGGATCCTA |
| | | CAACAGGATTTGTCAATATGCTTGATACACGTTACGAGAATATGGATAAAGC |
| | | TAAAGCCTTTTTTGCAAAATTTAGGAGTATTCGACAAAATGTCAGTAAGGGA |
| | | TGGTTCGAATTTGCTATTGATTATAATGATTTTACCTCGAAAGCAGCTGGAAC |
| | | CAAAACACAATGGACACTTTGTACCTATGGCACACGTATTGAAACCAAACGC |
| | | GATACGAAGCAAAATAACAATTTTGTTAGCGATGAGTTTGACTTGACAGACA |
| | | AGTTCAAGGTCTTGTTTAATAAATACAACATAGATGTAAACGGCAATCTAAT |
| | | GGAGCAGATTTGCTCACAAAATGACGCTACATTCTTCAAAGAATTACTACAC |
| | | ATGCTACATTTGACCTTGCAGATGCGAAATAGTATTACTGGAACAGAAGTGG |
| | | ATTATTTAATTTCACCTGTTATGAATGCTTCTGGTAAGTTCTACGATAGTCGT |
| | | ACTTGTGAAAATAATCTACCTAAGAATGCTGATGCCAACGGGGCCTACAACA |
| | | TTGCTAGAAAAGGATTGTGGATTGTCGAACAGATAAAACATTCGGACAATAT |
| | | ATCGAAATTAAAAATAGCAATCAGCAACAAGGAATGGCTACGATATACACA |
| | | AGGGTTGGTAGACTAA |
| 130 | 119 | ATGAACGACCTTTCGCAATTCACCAATTTATATTCTTTATCAAAAACTTTGCG |
| | | TTTTGAGTTGAAGCCCATCGGCAAGACTTTGGAGAATATTGAAAAGAATGGT |
| | | ATTCTTGAAAGAGACAACCGTCGTTCTATAGGATACAAATCCATTAAGAAGG |
| | | TAATAGATGAATATCACAAGGCGTTTATCGACCGCGTTCTGAATGACTATGA |
| | | ACGCAAATTGGATGAAACAGGAAGAATCGTTTGGAGAGATTCATTAAATGA |
| | | ACTGTATCGTCTGTATCATCTTTCTTCTACCGAAGCAAAGAGAAATGAAGAA |
| | | ATCCGCAAAACACAAGAAATATTACGGAAACAAATTTCAGAATGCTTTAAGA |
| | | AAGACAGACAATATAGCCGTTTGTTCGGGAAAGAATTAATTCGAGAGGACCT |
| | | AACAGAATTTGTAAACACTCCTTTATTTGAGCAATATATCCTCAGTCAGAAA |
| | | GGCAACGAAGACTTAAGTATAGATGATGTACGCCATATTCAAGAAGATGTTA |
| | | TTGAGGATATTGCCCAATTCAGAGACTTCACAACATATTTCTCTGGCTTTTAT |
| | | GAAAACAGACGGAATATGTACGTTGCCGACGACAAAGCGACCTCTATAGCA |
| | | AATCGTCTGATTATGGAGAACCTCCCAAAATTCATTGACAACATAGATGTGT |
| | | TCGAAAGAATTGCACAGAGCGAGGTGTCCGGCAATCTTGAAACTTTATGTAA |
| | | GGAAATGGAAGCTTATCTAAATGTCAATTCCATTGCAGAAATATTTTGTCTTG |
| | | ATTATTTTTCGATGGTATTGACGCAAAAACAGATAGACGTATATAATGCAAT |
| | | TATTGGCGGGATGTCGTTGGAAGACGGTACAAAAATCAAGGGACTAAACGT |
| | | GTATGTGAATCTTTATAATAAAAAACAAAAAGAGAAGACCTGCCGCTTGCCC |
| | | AAACTGAAGCCTCTTTTCAAACAAATTCTAAGCGAACGCAACGCCATCTCGT |
| | | GGCTGCCTGATGAATTTACAAGTGACAAGGAGTTGCTTGAAAGTATTGAAAA |
| | | ATGCTATCAAGACCTTAAGAATTCTGTTTTCGAGGGTAAAGATTCTCTAATGG |
| | | TGTTATTGAAAGAACTCGGCGAGTATGATTTAGAGCATATCTATCTACATAA |
| | | TGACTCTCAGCTAACAAACATTGCCCAGAAACAATATGGCGATTGGGCGACA |
| | | ATAAAAAGGGCTTTTGAGGAATCGGTCAAGGCTGCGACTCCCGCAAAGCGC |
| | | AACGAAACCACCGAAAAGTATGCGGCTCGAATAGAGAAAATCTTAAAAGCT |
| | | ACCGACAGCTTGTCTTTGTCGCAGATTAACCGAATGCTGAAGGCTTATATGG |
| | | GTGATGACTTCAAAACAATTGAGTCATACTTCACAGCAATGGGTGCAGAAGA |
| | | TACTGTGGACGGACAAAAGCCTAATCTTTTCATACGTATTGAAAACGCCTAC |
| | | GCAGATGTACAGCCTTTACTAAATACACCTTATCCAGAAGACAAAAAGCTGT |
| | | CGCAAGACAAAGCCAATGTTGCAAAGATAAAGAACCTATTAGATACCATCA |
| | | AAGACTTGCTGCACTTTGTAAAACCATTACTAGGGAATGGGACAAAAGGCGA |
| | | AAAAGACAATCGCTTCTATGGTGAATTCATTCCTTTATGGGAACTGCTTGACC |
| | | AAATTACGCCATTGTATAACATGGTGAGAAACAGGCTAACAAAGAAGGAGT |
| | | GTTCTGACGAGAAAATCAAACTGTTTTTCGAAAACAATAATGGTAGATTTTT |
| | | AAGTGGGTGGACGGACAATCAGACAGAATCCGATAACGGCACTCAATATGG |
| | | TGGCTATTTGTTCAGAAAGAGGAATGGCATCGGAGAATACGATTATTATCTG |
| | | GGAGTGTCTGATGCCAAAAAACTCTTTCGTAGTTTCAAATCAGTGCCAGATA |
| | | GCGATAAAAGTGACTACGAAAGACTGGATTACTATCAGTTGAAAGGTAAAA |
| | | CCTTTTATGGTGCTTTGTATAAAGGCGACTATGAATCAGAATCCGCAAATATC |
| | | AAGCGATCTATCGATTATTTTATCTCGCATAACGGTAACTCCGAAATCAAAG |
| | | GGAAAATCAATACAGAAAGGAGAAAACAGCAACCAAGAATATCAACAGCCA |
| | | TTGGATATCTTAAGTTTATCAGACAACACGATTTCGGATTGTATAAATTGCTT |
| | | TTACAAGATGCGGAATTTGAGAAAAGCAATCAGGAGATGATTGCTTCTATTA |
| | | GGGAGACACTATTATCTCTTGTCCGTATTCCATCGGCACATGAGTATGCAGAT |
| | | AAGACATACACCTTGTTCTCTAATATGATGGATGATGTCGAGATTTTACTTAA |
| | | AAGTAAGGTGTTTTCATACTTCACAGTAAGCCAAAGTGAACTCGACGAAGTC |
| | | CTCGTTAGAGAAGAAAAACCATTGTATCTGTTCAAGATTACGAATAAAGACT |
| | | TGTCTTATGCCGAGACTCACGAGAAAGGATTAAGAAAGACTCGCGGTACCGA |
| | | CAATTTGCATACTCTTTATTTCAAAGCATTGATGAGTGGAAACCAGAGTGTCT |
| | | TTGACATAGGATCTGGGGCGATTTTCTTCAGAGAAAAAAAGATCAACTACAC |
| | | GGATGAACAGATGAGGAAGGGACATCACCATGAAATGCTAAAAGACAAATT |
| | | CAATTATCCAATTATTTCAAACAAAAGGTACGCTTTCGACAAGTTTCAGTTTC |
| | | ATTTGTCAATATCGATAAACTATAATGCGGATAAGAATAAAGACATAAACCC |
| | | CATGGTGAATGCCTATCTGAAAGAATCCAACTCCACTCATATCATTGGTATTG |
| | | ACCGAGGAGAAAGGCACCTGCTGTACTTGTCGCTTATTGACCTTCAGGGAGA |
| | | TATCGTCGAACAATACACTCTGAATGAGATTGGAAACACCAATTATCACGAC |
| | | CTGCTGGGCATAAAAGAAAAACAGCGCAAAGAAGCTCGCCCCAATTGGATG |
| | | GAGATAGAAAACATTAGGGAGCTGAAAGAGGGCTATATGAGCCAGGTGATT |
| | | CACATAATTGCCCAACTGATGGTGAAATACAATGCTATTGTGGTACTTGAGG |
| | | ATTTGAACATGGGATTTATGCGTGGTCGTCAGAAAGTGGAAAAGCAGGTGTA |
| | | TCAGAAGTTCGAGAAGATGCTGATCGACAAATTGAACTATTTAGTGGATAAA |
| | | CAATGCAATGCAACTGAACTAGGGGGAGTTTTGAACGCCTACCAATTAACAA |
| | | ATACCCATAAGAAATTCTTAGAACAATATGGGAATCAGAAAAATGCATTAGG |
| | | CAAACAGTGTGGTTTCATATTTTACATTCCAGCATGGAACACAAGCAAAATG |
| | | GACCCTACTACCGGCTTTGTCAACCTATTGGATACTCACTATGAGAATATGG |
| | | AAAAAGCAAAAGCTTTCTTTGGCAAGTTCAAGAGCATTCGCAATAATGCTGC |
| | | CAAAGGCTGGTTCGAGTTCGAGTTTGATTACGATAACTTCACCACAAAGGCC |
| | | GCAGACACAAGAACACCTTGGACGCTCTACACCCATGGTACTCGCATAGAGA |
| | | CAAAACGTGACCCTAAGCAGAAAAACAACTTCGTTAGTGAAGAGTTTGATTT |
| | | GACAAGCAAATTCAAGGAACTGTTTGTTAAATACAAGATTGATTTGAACGAC |
| | | AACCTGATGGAGCAAATATGCTTACAAAATGATGCTTCGTTTTTTAAAGAAT |
| | | TGCTTCACCTGCTACAACTAACACTTCAAATGCGAAACAGCAAGATTGGAAC |
| | | TGATGTTGATTATCTTATATCGCCTGTAATGAACGACAAAGGAAAGTTTTAC |
| | | GATAGTCGTAATTGTGGCAAGAATCTACCGGAAAATGCTGATGCAAATGGTG |
| | | CCTACAACATTGCCAGAAAGGGATTGTGGATTATCGACCAGATTAAGCGCAC |
| | | GGATGACTTGTCGAGATTGAGGTTGGCCATCAGCAACAAGGAATGGCTGCAA |
| | | TATGCGCAGAAAATGGTGTGA |

### Group 9 Sequences (SEQ ID Nos: 131-330)

TABLE S9A
Enzyme Sequences Group 9 (SEQ ID Nos: 131-170)

| SEQ | |
|---|---|
| ID | |
| NO | Sequence |
| 131 | MDMKSLNSFQNQYSLSKTLRFQLIPQGKTLDNINESRILEEDQHRSESYKLVKKIIDDYHKA |
| | YIEQALGSFELKIASDSKNDSLEEFYSQYIAERKEDKAKKLFEKTQDNLRKQISKKLKQGE |
| | AYKRLFGKELIQEDLLEFVATDPEADSKKRLIEEFKDFTTYFIGFHENRKNMYAEEAQSTAI |
| | AYRIIHENLPKFIDNIRTFEELAKSSIADVLPQVYEDFKAYLKVESVKELFSLDYFNTVLTQK |
| | QLDIYNAVIGGKSLDENSRIQGLNEYINLYNQQHKDKKLPFLKPLFKQILSDRNSLSWLPEA |
| | FDNDKQVLQAVHDCYTSLLESVFHKDGLQQLLQSLPTYNLKGIYLRNDLSMTNVSQKLLG |
| | DWGAITRAVKEKLQKENPAKKRESDEAYQERINKIFKQAGSYSLDYINQALEATDQTNIK |
| | VEDYFINMGVDNEQKEPLFQRVAQAYNQASDLLEKEYPANKNLMQDKESIEHIKFLLDNL |
| | KAVQHFIKPLLGDGNEADKDNRFYGELTALWNELDQVTRLYNKVRNYMTRKPYSVDKIK |
| | INFKNSTLLNGWDRNKERDNTAVILRKDGKFYLAIMHKEHNKVFEKFPVGTKDSDFEKME |
| | YKLLPGANKMLPKVFFSKSRIDEFKPSAELLQKYQMGTHKKGELFSLNDCHSLIDFFKASIE |
| | KHDDWKQFNFHFSPTSSYEDLSGFYREVEQQGYKLTFKSVDADYINKMVDEGKIFLFQIY |
| | NKDFSEHSKGTPNLHTLYWKMLFDERNLQNVVYKLNGEAEVFFRKKSLTYTRPTHPKKE |
| | PIKNKNVQNAKKESIFDYDLIKNKRFTVDSFQFHVPITMNFKSEGRSNLNERVNEFLRQNN |
| | DAHIIGIDRGERHLLYLVVIDRHGNIVEQFSLNSIINEYQGNTYATNYHDLLDKREKEREEA |
| | RESWQSIENIKELKEGYLSQVVHKIADLMVKYHAIVVLEDLNMGFMRGRQKVEKQVYQK |
| | FEKMLIDKLNYLVDKKQDAETDGGLLKAYQLTNQFESFQKLGKQSGFLFYVPAWNTSKID |
| | PCTGFTNLLDTRYESIEKAKKFFQTFNAIRYNAAQGYFEFELDYNKFNKRADGTQTLWTL |
| | CTYGPRIETLRSTEDNNKWTSKEVDLTDELKKHFYHYGIKLDADLKEAIGQQTDKPFFTNL |
| | LHLLKLTLQMRNSKIGTEVDYLISPIRNEDGTFYDSRQGNKSLPANADANGAYNIARKGL |
| | WVINQIKQTPQDQKPKLAITNKEWLQFAQEKPYLKD |
| 132 | MDHFTNLYPVSKTLRFELIPDKRTKAILERTDLIAQDEHRAESYKLVKKIIDRYHKKFIDSV |
| | LGTLKLPLDELDSLHELYSKSQKSDADKKALEKIQDKLRKLIADALTKDSRYKRIDKKELI |
| | REDILSVIEPEEQALIDEFRDFTTYFTGFHENRRNMYSAEAQSTAIAYRLIHENLPKFIDNMA |
| | TFEKIAASPVAEHFPQLYQEMAEYLNVREIGDLFKLDYYTELLTQSQIEAYNAVIGGRTVE |
| | ESGKKIQGINEYVNLYNQQQPSRDTRLPKLKPLFKQILSDREAVSWLPEEFESDKDMLTAV |
| | KECYHSLNDHVFDPLRELLTNLSSYNLDGIYIPNDLSLTDISQAMFKDWSVIKKAIAEDVK |
| | RNCPLKRNEKADNYEERISKLIKRENSFSIGYMNHCIQEKDICDHFATLGASDNGEEQTVN |
| | LFLQIQNAYTDAQSLIENDYPEDRNLAQDKENVARLKALLDAVKALQRFVKPLRGNGDEP |
| | DKDERFYGELAVLWEELDHITPLYNKVRNRMTRKPYSIEKFKLNFQNSTLLDGWDLNKER |
| | DNTGVIMRKDGKYFLAIMNKQFNRIFVDAPQAGHDEDTFEKMEYKLLPGANKMLPKVFF |
| | SKSRIEEFKPSPELLEHYEKGTHKKGDNFSLKDCHELIDFFKASIAKHEDWSKFDFHFSPTD |
| | TYEDLSGFYREVEQMGYKISYKQIPVSYIDKMVEEGKLFLFQIYNKDFSPYSKGTPNLHTL |
| | YWKMVFDERNLANVVYKLNGQAEVFYRKKSLDYDRPTHPANQAIKNKNPETTKKESTFD |
| | YDIIKDKRFTMDKFQFHVPITINFKATGSGSINPLVNQYIHDHDDLHFIGIDRGERHLLYVTV |
| | IDSKGCIKEQFSLNEIVNEYQGNTYKTNYRSLLDKRDDERQRERQSWNTIEGIKELKQGYL |
| | SQVIHKIVSLMVKYHAVVVLEDLNMGFKRGRQKVESSVYQQFEKALIDKLNLLIDKKIDA |
| | DQPGGLLHAYQLTNKFTSFRDMGRQNGFLFYIPAWNTSKIDPVTGFVDLLHPRYESVDKS |
| | RSFFCKFKSIRYNQDKGWYEFTMDYNDFTTKAEGTRTEWTLCTHGTRVETFRNAEKNSS |
| | WDSREVNLTDEFNALFATYGVEPQGNLKQAIAERSQKEFFDKLTHLLALTLQMRNNITGT |
| | EVDYMISPVADENGKFFDSRTCGKELPENADANGAYNIARKGLWVARQIQAAHVDEKVN |
| | MAISNKEWLSFAQSKPYLND |
| 133 | MKQLNDLTGLYSLSKTLRFELKPIGKTLEHIESKGFITQDEKRAEEYKRVKDIIDRYHKSFIT |
| | MCLCGFKFNQEDLDTYAALAEDFNRDEKAFEESKKTLRKQIVGAFKKGGGYSDLFKKELI |
| | QKHLPEIVTDDEEKKMVENFSKFTTYFTGFNENRKNMYSDEEKSTAIAYRLIHDNLPMFLD |
| | NTRSFSRIADSDVRQSFCKIESSFSEYLNVEHLAEMFQLDYFSETLTQEQIAVYNHVVGGRT |
| | LEDGTKIQGINEYVNLYNQQHKDNRLPLLKPLYKMILSDRVALSWLPDEFANDKEMIDAI |
| | KETYDSLKENLTGDGDGSLRNLLLNINNYDIEHIYIANDLGLTDISQQMFGQYDVYTSAIK |
| | QELRNSVTPTAKERREPELYAERINKLFKSTKSFSVAYLNSLVDAEHTIQNYYQQLGAYDR |
| | DGEQRINLFTQLEMAYVAAKDILSGKHGNISQTDAEIAIIKNLLDAYKSLQHFIKPLLGNGD |
| | EADKDNEFDAKLREVWDALDIVTPLYNKVRNWLTRKPYSTEKIKLNFENAQLLNGWDKN |
| | KETDCTSVLLRKDGKYFLAIMDKKANRAFDVEDLPCDGICFEKMNYKQIALPMGLGAFV |
| | RKCTGSAKKLGWTCPSSLLNKDMKIIIKDDEATNVLPSLIECYKDFLNIYEKDGFKYKDFN |
| | FKFKPTHEYKKLSHFFAEVPTQGYKITFRKVSESFINQLVDEGKLYLFQIWNKDFSEFSKGS |
| | PNMHTLYWKMLFDERNLADVVYKLNGQAEVFYRKSSLDVANTTIHKAHQPILNKNQEN |
| | KKQQSTFDYDIIKNRRYTVDKFQFHVPISINFKATGRDNVNSQVLDIIRNGGIKHIIGIDRGE |
| | RHLLYLSLIDLKGNIVKQMTLNDIVNEYNGNTYATNYRDLLAEREGNRTEARKNWKKIEN |
| | IKDIKQGYLSQVVHIISKMMVEYDAIVVLEDLNMGFMRGRQKIERSVYEQFEKMLIDKLN |
| | YYVDKQKDVNEAGGLLHALQLTSRFESFKKLGKQSGCLFYIPAWNTSKIDPVTGFVNLFD |
| | TRYTNADQARKFFSLFDSIRYNAEKNWFEFAFDYDKFTTKAKGTRTRWTLCTYGTRIRTF |
| | RNPAKLNQWDNKEVVLTDEFKKAFADAGIDIHGNLKEAICSLEDKKYLEPLMHLMKLLL |
| | QMRNSITNTEVDYLLSPVADKNGSFYDSRVCSYALPKDADANGAYNIARKGLWAIRQIQE |
| | TPVGERPNLAIKNNEWLKFAQQKPYRDE |
| 134 | LLNYKYYIVMKTYDELTGLYSLSKTLRFELKPVGKTLEYIENKGIIAQDEKRAEEYKLVKG |
| | IIDRYHKSFIRLCLYNFKLKLESDNGLDSLEEYVEYASIQRRTDTQDAEFKKVKENLRKQIV |
| | SAFKNGATYGDLFKKELIQQILPDFADNDEERQLVDNFSKFTTYFTGFHENRKNMYSEDD |
| | KATAIAFRLIHENLPLFIDNMKSFAKIAETVVAEHFADIETAFEDCLNALIPDMFALPYFTKT |
| | LTQEQIEVYNNIIGGRVLEDGTKIQGINEYVNLYNQQQKDKSARLPLLKPLYKMILSDHVAI |
| | SWLPEEFASDEEMLSAINGAYDMLKDVLSEKNEDSLFNLLKNINEYDTEHIFIANDLGLTDI |
| | SQQIFGQYDVYSSVIKAELRNQASMTAKEKKNPELYEDRIAKLYKSAKSFSIDYLNSFVDS |
| | EKSIQNYYAQLGAYDRDGEQRINLFAQIEMKHIAVADILAGKVANLNQSEQGIKLIKDFLD |
| | AFKALQHFIKPLLGNGDETDKDNAFDARLRVAWDTLDIITPLYNKVRNWLTRKPYSEEKI |
| | KLNFENAQLMNGWDLNKEPDCTSIILRKDDKFYLAIMDKKANHSFDTDELPNEGDCYEK |
| | VDYKLLPGANKMLPKVFFSKSRIDEFAPSQSLLDAYEKGSHKKGTNFSLNDCHNLIDFFKQ |
| | SIAKHEDWKKFPFDFSDTSSYEDISGFYREVEQQGYMLSYRNVSAAYIDKLVDEGKLFLFQ |
| | IWNKDFSEYSKGTPNMHTLYWKMLFDEKNLANVVYKLNGQAEVFYRKKSLDIANTTVH |
| | TANRPIANKNKDNKKKESTFEYDIIKNRRYTVDKFQFHVPITMNFKSIGNDNINESVLNVIR |
| | NNGIKHIIGIDRGERHLLYLSLIDLKGNIVKQMTLNDIVNEYNGNTYSTNYKDLLATREGD |
| | RTDARRNWQKIENIKDLKEGYLSQVVHVIAKMMVEYKAIVVLEDLNMGFMQGRQKIERN |
| | VYEQFERKLIEKLNFYVDKQKKADEVGGLLNAYQLTSKFDSFKKLGKQSGCLFYIPAWNT |
| | SKIDPVTGFVNMLDTRYENTEKARCFFSKFDSIRYNTQKDWFEFAFDYGNFTTKADGTQT |
| | KWTLCSFGTRVKTFRNPEKVNQWDNVEVVLTEEFKSLFADAGININGNLKEQICNLSDKK |
| | YLEPLMGLMKLLLQLRNSITNSEVDYLLSPVCDNKGNFYDSRTCSNKLPKDADANGAYNI |
| | ARKGLWALARIVDSAEGERPNLAISNKDWLCFAQQKPYLND |
| 135 | MERFDELTGLYSLSKTLQFELKPIGKTLEQIERKGIIAQDEKRAEEYEIAKCIIDEYHKAFIS |
| | MCLKGLRLNLSSTGSLDSLEEYVEQASKLRRSESEEKNFDTIKQNLRRQIVNSFKSRGGSFT |
| | DLFKKELITQHLPEFVSEKNKKQIVENFSKFTTYFTGFHENRKNLYSEEEKSTAIAYRLIHEN |
| | LPMFIDNIKTFAKIADSDVANYFVEIETTFSEYLDGSHITDMFKLEYFTETLTQEQISLYNNV |
| | IGGVSNEDGTKKKGLNEYVNLYNQQNKTRLPLLKPLYKMLLSDKVSLSWLPDDFVSDEE |
| | MIYAINEMQLSLKDLLYSDGENSLKYLLTHIGDYDTEHIYISNDLGLTDISQQIFGQYDVYT |
| | SGIKTELCNQIKQSAKEKREPELYKERINKLFKSAKSFSINYLNSFAEGDKTIQAYYARLGA |
| | HDLEGEQSTNLFTQIEMASIAASDILAGKHTNINQSEEDTKLIKDLLDTYKALQHFIKPLLG |
| | NGDEADKDNEFDARLRNAWDALSVVTPLYNKVRNWLTRKPYSTEKIKLNFDNAQLLGG |
| | WDLNKEPDCTSVLLRKDDMFYLAIMDKKYNHAFDIDELPCEGECYEKVDYKLLPGANKM |
| | LPKVFFSKSRISEFAPSLAIQKSYNEGTHKKGSNFSISDCHRLIDFFKQSIAKHEDWSKFPFSF |
| | SDTKRYEDISGFYREVEQQGYMLSYRNVSVSFINQLVDEGKLYLFQIWNKDFSKYSKGTP |
| | NMHTLYWKMLFDEVNLADTVYKLNGQAEVFYRKSSLKLENTTIHKANQTIKNKNVQNE |
| | KKTSTFDYDIVKNRRYTVDKFQFHVPITLNFKATGGDNINANVQDIIRNNGIEHIIGIDRGER |
| | HLLYLSLIDLKGNIVKQMTLNDIINEYKGNIYKTNYKDLLVTREGDRTEARRNWHKIENIK |
| | DLKEGYLSQVVHIIARMMAEYKAIVVLEDLNMGFMRGRQKIERNVYEQFERMLIDKLNY |
| | YVDKQKKATENGGLLHALQLANKFESFKKLGKQSGCLFYIPAWNTSKIDPVTGFVNLFEI |
| | HYENVDKARCFFSKFDIIQYNEERDWFEFAFDYNDFGTKAEGTKSKWTLCTYGTRIKTFR |
| | NPNKLNQWDNEEVVLTEEFKKIFNEAGIDINGNIKDAICQLKEKKHLESLMHLMKLLLQM |
| | RNSVSNSEIDYLLSPVADENGEFYDSRTCAPTLPKDADANGAYNIARKGLWVIEQIKQTAD |
| | KPRLAMTNKEWLKFAQDKPYLNE |
| 136 | MNTFNELSGLYSLRKTLQFELKPIGKTLENIEKKGIIEQDTQRDVEYKKVKGIIDNYHKAFI |
| | KMCLWNLELKLESDGHSDSLEDYVRLASIIRRGELDEIEFSKVKDNLRKQIVSAFKNGNSY |
| | GDLFKEELIQEHLPNFVTDEAEKQMVDNFSKFTTYFSEFHKNRKNMYSDEKKSTAIAYRLI |
| | HENLPIFIDNIKTFKKIANTEIVNHFADIKQAFQECLNVENIDEMFQLNYFTKTLPQEHIETY |
| | NNIIGGKTNEDGSKIQGLNEYINLYNQQQKDHSNRLPLFKPLYKMILSDREALSWLPEEFAS |
| | DEEMINAINEVYDSLKNVLANDNNGLKHLLLNINQYDTEQIYIANDLGLTDISQQMFGKY |
| | DVFTSGIKNELRGQISPSAKEKREPELYEEKINKIFKSARSFTINYLNSFVQDGKTIQSYFAQ |
| | LGATNTDSAQCIDIFTKIEMAHIAATDILEGKHNSIDQSDSDIKLIKDLLDAYKELQHFIKPL |
| | LGSGDEAMKDNEFDAQLHYAWDSLNIITPLYNKVRNWLTRKPYSTEKIKLNFENAQLLGG |
| | WDMNKETDCTSVLLRKDNMYYLAIMDKKSNHAFDIDVLPNEGDCYEKVDYKLLPDAYK |
| | MLPKVFFSKSRINEFAPSKDIQNAYQKGTHKKGPNFSISDCHRLIDFFKQSIAKHEDWQKFP |
| | FSFSDTDSYDDISGFYREVKQQGYMLGYRKVSVSFINQLIDDGKLYLFQIWNKDFSEHSKG |
| | MPNIHTLYWKMLFDERNLSNIIYRLNGKAEVFYRQNSLKLENTTIHKANQPIKNKNIQNSK |
| | ECSTFDYDIIKNRRYTADKFQFHVPITLNFRSTGSDNINNKVNDVIRNNDIEHIIGIDRGERH |
| | LLYLSLIDLKGNIVKQMTLNDIVNEYNGNTYKTNYKDLLVQREGDRTEARRNWQKIENIK |
| | EIKEGYLSQVIHIITKMMVEYKAIVVLEDLNMGFMRGRQKIERNVYEQFEKKLIDKLNYYV |
| | DKQKDITDAGGLMHALQLANKFESFKKLGKQSGCLFYIPAWNTSKIDPVTGFVNLLDTHY |
| | ENIDKARCFFSKFDSIRYNASNDWFEFELDYDKFTDKARGTKTHWTLCSYGTRIRTFRNPL |
| | KLNQWDNEEVVLTEEFKKVFNNANIDIYGNLKNSICSLNDKTTLESLMQLMKLMVQMRN |
| | SITGTETDYLLSPVTDANGNFYDSRNNIPTLPIDADANGAYNIARKGLWIIQKIQQSQPGEK |
| | LNLAISNREWLQFAQQRPYLNE |
| 137 | MKTFNDLTGLYSLSKTLRFELKPVGKTKDNIETKGIIAQDEKRAEEYKKVKDIIDRYHKKFI |
| | EMCLANLKLKTISDGNNDSLKEYVTLASKANKDEKEDNDFKDVKTALRKQIVDAFKKGG |
| | SYSDLFKKELIQVHLPDFVTDEQEKQMVENFGKFTTYFTGFNENRQNMYSDEEKSTSIAYR |
| | LIHENLPMFIDNIKSFAKIAEHEDIDFLPDIENGFKEELKRLKAQSISEVFDLANFTNTLTQSQ |
| | IDSYNAIIGARHDENGDKVQGINQYVNLYNQKNKDARLPLLKPLYKMILSDRGALSWLPE |
| | EFATDEEMLAAINETHGNLKNVMTDVRKLLQNIDSYDTEHIYIANDKGLTDISQQIFGQYD |
| | VYTSAIKAELRDSITPSAKERKDPELLEKRINDIFKASKSFSIEYLNSHVDSDKTIQSYYKEL |
| | GAYDRNGEQRINLFSQIELAYVDAHDVLLGKHTNLNQSEDSIKKIKALLDAYKALLHFIKP |
| | LLGNGDEADKDNEFDAKLRAIWDELDIVTPLYDKVRNRLTRKPYSTEKIKLNFDNAQLLN |
| | GWDMNKEPDCTSVLLRKDGQYYLAIMDKKSNHAFDIDELPCNGECYDKMDYKLLPGAN |
| | KMLPKVFFSKSRIKEFAPSKEICDAYQKGTHKKGANFSIKDCRRLIDFFKDSIAKHEDWSKF |
| | PFTFSDTSTYEDISGFYREVEQQGYMLGYRKVSVSFINQLVDEGKLYLFQIWNKDFSEYSM |
| | GTPNMHTLYWKMLFDERNLANVVYKLNGQAEVFYRKKSLDLNKTTIHRANQPIANKNM |
| | QNEKRESTFCYDIVKNRRYTVDKFQFHVPITINFKATGSDNINASVLDVIRNNGIEHIIGIDR |
| | GERHLLYLSLIDMKGNIVKQMTLNDIINEYKGNTYTTNYKELLQAREGDRKEARQNWQKI |
| | ENIKELKEGYLSQVVHVITKMMVEYKAIVVLEDLNGGFMRGRQKIERQVYEKFEKMLIDK |
| | LNYYVDKQRDANENGGLLHAYQLASKFDTFKKLGKQSGCLFYIPAWNTSKIDPVTGFVN |
| | MLDTRYENADKARNFFSKFKSINYNADKNWFEFVIDDYSKFTDKAKDTRTDWVLCTYGT |
| | RIKTFRNPEKLNQWDNKEIVLTDEFKKVFMEAGIDINGNLKEAICTLTEKKHLESLMQLMK |
| | LLVQMRNSETNSEVDYLLSPVADTEGHFYDSRNCGDNLPKDADANGAYNIARKGLWAV |
| | MKIKASKPQENLKLGISNKEWLQFAQEKPYLND |
| 138 | MKNILEQFVGLYPLSKTLRFELKPLGKTLEHIEKKGLIAQDEQRAEEYKLVKDIIDRYHKAF |
| | IHMCLKHFKLKMYSEQGYDSLEEYRKLASISKRNEKEEQQFDKVKENLRKQIVDAFKNGG |
| | SYDDLFKKELIQKHLPRFIEGEGEEEKRIVDNFNKFTTYFTGFHENRKNMYSDEKESTAIAY |
| | RLIHENLPLFLDNMKSFAKIAESEVAARFTEIETAYRTYLNVEHISELFTLDYFSTVLTQEQI |
| | EVYNNVIGGRVDDDNVKIQGLNEYVNLYNQQQKDRSKRLPLLKSLYKMILSDRIAISWLP |
| | EEFKSDEEMIEAINNMHDDLKDILAGDNEDSLKSLLQHIGQYDLSKIYIANNPGLTDISQQM |
| | FGCYDVFTNGIKQELRNSITPTKKEKADNEIYEERINKMFKSEKSFSIAYLNSLPHPKTDAP |
| | QKNVEDYFALLGTCNQNDEQQINLFAQIEMARLVASDILAGRHVNLNQSENDIKLIKDLLD |
| | AYKALQHFVKPLLGSGDEAEKDNEFDARLRAAWNALDIVTPLYNKVRNWLTRKPYSTEK |
| | IKLNFENAQLLGGWDQNKEPDCTSVLLRKDGMYYLAIMDKKANHAFDCDCLPSDGACFE |
| | KIDYKLLPGANKMLPKVFFSKSRIKEFSPSESIIAAYKKGTHKKGPNFSLSDCHRLIDFFKAS |
| | IDKHEDWSKFRFRFSDTKTYEDISGFYREVEQQGYMLGFRKVSETFVNKLVDEGKLYLFHI |
| | WNKDFSKHSKGTPNLHTIYWKMLFDEKNLTDVVYKLNGQAEVFYRKKSLDLNKTTTHK |
| | AHAPITNKNTQNAKKGSVFDYDIIKNRRYTVDKFQFHVPITLNFKATGRNYINEHTQEAIR |
| | NNGIEHIIGIDRGERHLLYLSLIDLKGNIVKQMTLNDIVNEYNGRTYATNYKDLLATREGER |
| | TDARRNWQKIENIKEIKEGYLSQVVHILSKMMVDYKAIVVLEDLNTGFMRSRQKIERQVY |
| | EKFEKMLIDKLNCYVDKQKDADETGGALHPLQLTNKFESFRKLGKQSGWLFYIPAWNTS |
| | KIDPVTGFVNMLDTRYENADKARCFFSKFDSIRYNADKDWFEFAMDYSKFTDKAKDTHT |
| | WWTLCSYGTRIKTFRNPAKNNLWDNEEVVLTDEFKKVFAAAGIDVHENLKEAICALTDK |
| | KYLEPLMRLMTLLVQMRNSATNSETDYLLSPVADESGMFYDSREGKETLPKDADANGAY |
| | NIARKGLWTIRRIQATNSEEKVNLVLSNREWLQFAQQKPYLND |
| 139 | LTRKPYKTEKIKLNFENSQLLGGWDVNKEPDCTSVLLRKDGMYYLGIMDKKANKSFYCD |
| | CLPSEGSSYEKVDYKLLPGANKMLPKVFFSKSRKSEFAPSEVITKAYENGTHKKGANFSLS |
| | DCHRLIDFFKASINKHEDWSRFGFIFSETNTYEDMVGFYREVEQQGYMLGFRNVSEEYIDR |
| | LVDDGKLYLFQIWNKDFSEHSKGTPNLHTIYWKMLFDERNLENIVYKLNGQAELFYRKKS |
| | LDLCKTTVHKAHQSVANKNPQNDKRESIFEYDIIKNRRYTVDKFQFHVPITINFKATGDDR |
| | LNSATLEAIRDGGIEHIIGIDRGERHLLYLSLIDLKGNIVKQFTLNEIASEYNGAPCPPTNYK |
| | DLLVAREGDRNEARRNWQKIENIKEIKEGYLSQVVHIIAKMMVEYKAIVVLEDLNMGFM |
| | RGRQKIERQVYEKFEKMLIDKLNCYVDKQKEATDIGGVLHPLQLTSRFESFRKLGKQSGW |
| | LFYIPAWNTSKIDPVTGFVNMLDTRYENVDKTRCFFSKFDVIRYNGDKDLFEFTFDYDKFT |
| | DKAKGTRTKWTLCTYGSRIKTFRNPKKNNQWDNEEIVLTDEFKKAFADAGIDIEGNLKDA |
| | ICSLTEKKHLEPLMNLMKLLLQMRNSKTGTEIDYLLSPVADADGNFYDSRNEISTLPKDAD |
| | ANGAYNIARKGLWAIRKIQSAPSGEKPNLAISNKEWLQFAQQKPYLDD |
| 140 | MNTFNQFTNLYNVQKTLCFELQPVGKTRENIEEDGLLKQDEERAENYKKVKGFIDEYHKQ |
| | YIKDRLWNYELPLKGEGKRNSLEEYQQFYELSKRDANQEATFTEIKDNLRAIIAKRLTEKG |
| | SAYERIFKKELIREDLIEFLDKEEDKELVRQFSDFTTYFTGFHENRANMYKDEEQSTSIAYR |
| | LIHQNLPKFMDNIKAFSAIAQTPVAEHFKELYARWESYLNVSSIDEMFRLDYFSHTLTQPHI |
| | EVYNSIIGKRILEDGTEIKGINEYVNLYNQQQKDKKLPLFVPLYKQILSDRERLSWLSEEFD |
| | SDAKMLKAINECYDHLHDLLMGKENESLCELLKHLTDFNLSQINITNDLSLTDISQSMFGR |
| | YDVFTTGLKNTLKISTPQKRDEKEEAYEDRITKLFKACKSFSIAELNGLQLPVAEDGGHKR |
| | VEDYFISLGAVGKEKNLFEQIEEAYTEALPILQLKETDDTLSQNKAAVAKIKDLLDAFKNL |
| | QHFVKPLLGSGEENEKDEVFYGAFQTLWDELDAVTPLYNKVRNWLTRKPYSTEKIKLNFD |
| | NAQLLDGWDENKETANASIILCKDGFYYLGIVKKDNRKLLGMPMPSDGECYDKVVYKFF |
| | KDITTMVPKCTTQKKDVVAHFAHSNEDYILFDKKTFNAPVTITKEIYELNNILYNGVKKFQ |
| | IEYLRSTGDKSGYEHAVFTWKTFCLQFLKAYKSTSIYNLKLVEQHIDSYYDLSSFYSAVNL |
| | LLYNLSYRKVSMSYVHSLVEEGKLFLFRIWNKDFSEYSKGTPNLHTLYWKMLFDERNLA |
| | DVVFKLNGQAEVFYRKASIKQENRIIHPAHQAINNKNPLNRTPTSTFDYDIIKNKRYTVDKF |
| | LFHVPITINFKAKGLTNINPLVLDVIRKGGFSHIIGIDRGERHLLYLSLIDLKGNIVKQMTLNE |
| | IINVYREQTYVTNYHNLLAQREGDRTKARRSWDTIENIKELKEGYLSQVVHVISKMVVEY |
| | HAIVVLEDLNMGFMQSRQKIERQVYEKFEKMLIDKLNCYIYKQVDPTSEGGVLHALQLTN |
| | KFESFRKLGKQSGCLFYIPAWNTSKIDPLTGFVNFINPKYESIQAARDLIGKFEDIRYNPEKN |
| | YFEFHIKDYAAFNPKAKSSRQEWVICTKGTRIRTFRNPDKNNEWDSEEIVLTEKFKELFDS |
| | YGIDYRCNLLASILIQTKKDFFHNEDVKKPSLLSLLKLTLQLRNSHINSEVDYILSPVADAK |
| | GSFYDSRTCGSSLPNNADANGAFNIARKGLMLVERIRSIKDDEKPALTITNEEWLHYAQAQ |
| 141 | MKSLTNLYPVSKTLRFELQPIGKTKENIEKHGILSRDEQRAEDYITVKKYIDEYHKQLIKDR |
| | LWNFKLPMKSDSKLNSLQEYQELYELSKRDACQEDRFTELKDNLRAIIAKQLTGGTAYGR |
| | IFKKELIREDLIDFLTQEEEKETVRQFADFTTYFTGFHENRKNMYSAEEKSTAIAYRLIHQN |
| | LPKFMDNMKAFAKIAKSPVAEKFANIYKEWEDSLNVSCLEEIFQLDYFSETLTQPHIEVYN |
| | YIIGKKTKEDGNDVKGINEYVNEYNMRHKDNPLPLLVPLYKQILSDREKLSWIAEEFDSDE |
| | KMLSAINESYNSLHDVLMGEENESLRSVLLHIKDYNLERVNINSESLTDISQHIFGRYDVFT |
| | NGIKAKLRGKNPKKRNESDESFEDRITKIFKTQKSYSIAYLNNLPQPTMEDGRVRTIEDYFIS |
| | LGAINIEAKQKINLFAQIENAYHDAFTILKRTDTDDTLSQDKKAVEKIKVLLDAFKDLQHFI |
| | KPLLGSGEENEKDELFYGIFQLIWDELEAITPLYNKVRNWLTRKPYSTEKIKLNFDNAQLL |
| | DGWDENKETANASIILCKDGLYYLGILNKDYRKLLGMPMPSEGDCYDKVVYKFLKDITT |
| | MVPKCTTQKKEVVAHFGQSVEDYVLFDPKTFNAPVTVTKEIFDLNNVLYNGVKKFQIEYL |
| | RSTDDSLGYEHAVSTWKSFCMQFLKAYKSTSIYNLASVEQKMNSYSDLSSFYKAVNLLLY |
| | NLSYRKVSVDYIHSLTEEGKLYLFRIWNKDFSEFSKGAPNLFTLYWKMIFDERNLDNVVY |
| | KLNGQAEVFFRKSSIKPENRVIHPAHRPIDNKNEQNKKRTSTFKYDIIKDYRYTVDKFQFH |
| | VPITIGFKSEGQTNINSRVQDIIRRGGFTHIIGIDRGERHLLYLSLIDLRGNIVMQKTLNVISRE |
| | VRGVTYSTNYRDMLEKREGDNKEARRSWGVIESIKELKEGYLSQAIREIANMMVEYNAIV |
| | VLEDLNQGFMRGRQKIERQVYEKFEKMLIDKLNCYVDKQIAPSSIGGALHPLQLTNKFESF |
| | RKLGKQSGCLFYIPAWNTSKIDPVTGFVNLFDTRYDTREKARMFFSKFKRIKFNTEKDWFE |
| | FAFNYNDFTSKAEGTRTEWTLCTYGERIRQFRNPEKNHNWDDETIVLTDEFKRLFCEYGID |
| | IHGNLKESIVAQSDAKFFRGLLGLMKLLLQMRNSIANSEEDYLLSPVMDEKGCFFDSRDND |
| | GTLPENADANGAYNIARKGLWIIRKIRETAENEKPSLKITNKQWLLFAQSKPYLND |
| 142 | MNTSNLSRFTNLYSISKTLRFELQPLGKTKDYIEKNGILMRDEKRAEDYKTVKGIIDEYHK |
| | KYIKSRLWDFKLPLASEGKRDSLEEYKALYEVSKRSEADEAAFKEVKDNLRSIIAKRLTSG |
| | KAYETIFKKELIREDLINSLEDEVEREIVSQFADFTTYFGGFHENRKNMYDAGEKSTAIAYR |
| | LIHQNLPKFMDNMKAFAKIAETSIAEHFADIYEGSKEMLNVGSIEEIFRLDYFSEILTQPHIE |
| | VYNSIIGKRVLEDGTEIKGINEYVNLYNQQQKDKRLPLLVPLYKQILSDREKLSWLAEEFD |
| | CDEKMLAAINETYAHLHDLLMGNENESLRSLLLHLRDYDLEQINISNDLSLTDISQHLFGR |
| | YDVFTNGIKEELRVITPRKRKETDEQLEDRISKIFKTQKSFCIAFLNSLPQPAMEDGKARCIE |
| | DYFMALGAVNNETTQKENLFAQIENAYENAKSVLQMKETGDMLSQNKPAVAKIKALLD |
| | ALKDLQHFIKPLLGSGEENEKDELFYGSFQMMWDELDAVTSLYNKVRNWLTRKPYSTEKI |
| | KLNFDNAQLLDGWDENKETTNASILLYKDGNYYLGIIKKEDRKILGSPMPTDGECYDKVV |
| | YKFFKDITTMVPKCTTQKKDVIAHFMHSDDDYILYDKKTFDAPVTITKEIYNLNNVLYNG |
| | VKKFQIEYLRSTGDKRGYEHAVFIWKSFCMHFLKAYKSTSIYNLVLVEQQINSYYDLSSFY |
| | NAVNLLLYNLSYRKVSVNYIHSLVDEGKLYLFRIWNKDFSEYSKGTPNLHTLYWKMLFDE |
| | RNLADVVYKLNGQAEVFYRKSSIQPEHRIVHPAGKPIANKNEHSKEPTSTFKYDIVKDRRY |
| | TVDKFQFHVPITINFKAAGQENINPVVLDAIRRGGFTHIIGIDRGERHLLYLSLIDLQGNIVE |
| | QMTLNEIINEYKGLKHKTNYHDLLAKREGERTEARRSWDTIENIKEMKEGYLSQVVHIISK |
| | MMVEYNAIVVLEDLNTGFMRSRQKIERQVYEKFEKMLIDKLNCYIDKQVGASDIAGLLHP |
| | LQLACEAKKWKRSHQCGCLFYIPAWNTSKIDPVTGFVNLFDTRYENAAKAKAFFGKFGSI |
| | RYNAEKDWFEFAFDYNDFTTKAEGTRTEWTLCTYRERIRTFRNPQKNHQWDDEEIVLTD |
| | AFKQLFDKYDIDMKGNLKEAICAQNDVQFFKDMMELMKLLLQMRNSITNSETDYLLSPV |
| | ADEKGQFFDSRRGITTLPDNADANGAYNIARKGLWVIRKIQETAENEKPSLAITNKEWLQF |
| | AQTKPYLNE |
| 143 | MKQFTNLYPVSKTLRFELQPIGKTKENIEKNGILTRDEKRAKDYQVVKGFIDEYHKQYIKD |
| | RLWNFKLPLASEGNLDSLEEYQMLYEMPRRDDTHEEDFSEVKDNLRAIITKRLTENGSAY |
| | DRIFKKELIREDLIEFLNNEEDKALVRQFADFTTYFSGFHENRRNMYSAEEKSTAIAYRLIH |
| | QNLPKFMDNMKAFAKIAETSVAEHFSNIYEGWEEYLNVGSIEEIFRLDYFSETLTQPHIEVY |
| | NYIIGKKVLEDGTEIKGINEYVNLYNQQQKDKSKRLPFLVPLYKQILSDREKLSWLAEEFD |
| | SDEKMLGAINESYTHLHELLMGEENESLRSLLLHLKEYDLSQINITNDLSLTNISQHLFGRY |
| | DVYSNAIKEQLKIIIPRKKKETDEEFEDRISKIFKTQKSFSISFLNNLPHPETENGKPRSVEEYF |
| | ISIGTINTKTTQKENLFAQIENAYENVRVILQMKDTGNALSQNKPAVTKIKALLDAFKDLQ |
| | HFIKPLLGSGEELEKDELFYGSFQMIWDELNTVTPLYNKVRNWLTRKPYSTEKIKLNFDNS |
| | QLLGGWDVNKEPDCTGILLRKDSFYYLGIMDKKANRVFETDITPSEGDCYEKMVYKQLG |
| | QISQQLPRIAFSKTWQQKLSIPEDVIKIKKNESFKKNSGDLQKLISYYKSFISQHDEWNSYFD |
| | INFTDRNDYKNLPDFYSEVDSQFYSLSFSRVPSSYINQLVDEGKLYLFRIWNKDFSEYSKGT |
| | PNLHTLYWKMLFDERNLSNVVYKLNGQAEVFYRKASIQPENRIIHKANLSIVNKNELNKK |
| | RTSTFEYDIIKDRRYTVDKFQFHVPITINFKGTGQLNINPIVQETIRQGGFTHIIGIDRGERHL |
| | LYLSLIDLNGNIVKQMTLNDIFNEYKGQTYKTNYHDLLVKREGDRTDARRSWDTIETIKEL |
| | KEGYLSQVVHVISKMMVEYKAIVVLEDLNTGFMRGRQKIERQVYEKFEKMLIEKLNCYID |
| | KQADATEVTGLLHPLQLTCEAKKWKRSHQCGCLFYIPAWNTSKIDPVTGFVNLLDTRYDT |
| | REKARLFFSKFQRISFNTEKGWFEFTFDYNDFTTKAEGTRTQWTLCTHGERIRTFRNPQKN |
| | NQWDNERIVLTDEFKKLFDQKEIDISGNMKEAICNQKDAQFYRDLLGLMKLLLQMRNSIA |
| | NSEEDYLLSPIADKNGHFFDSRERISSLPVDADANGAYNIARKGLWIVRKIRNTSEGEKLSL |
| | AITNKEWLLFAQSKPYLND |
| 144 | MKKLTNLYPVSKTLRFELQAIGKTKENIEKNGILQRDEKRAEDYKIVKSLIDEYHKQFIKDR |
| | LWNFKLPLHNEGHLDSLEEYQALYEISKRNDTQEAEFTEIKDNLRSIISKRLTECGSAYERIF |
| | KKELIREDLIDFLESNEDKDIVRQFADFTTYFSGFHENRRNMYVAEEKSTAIAYRLIHQNLP |
| | KFMDNMKAFAKIAETSVAEHFTDIYEGWKEFLNVGSLEEIFRLDYFSETLTQPHIEVYNYII |
| | GKKILEDGAEIKGINEYVNLYNQQQKDKSKRLPFLVPLYKQILSDRDKLSWLADEFDSDEK |
| | MLAAINESYNHLHDLLMGLENESLRSLLLNIKDFNLSQINISNDLSLTDISQHLFGRYDVFT |
| | SGIKDELRIITPRKKKESDEEFEDRISKIFKTQKSFSVDFLDKLPQPVMEDEKPRTIEDYFMTL |
| | GAVNTEATQKENFFAQIENAYEDARTILQIKDTGDTLSQNKSAVAKIKALLDALKDLQHFI |
| | KPLLGSGEENEKDELFYGSFQMMWDELDTVTSLYNKVRNWLTRKPFSTEKIKLNFDNSQL |
| | LGGWDVNKEPDCKGILLRKDDFYYLGIMDKKSNRIFEADVTPTDGECYDKIDYKLLPGAN |
| | KMLPKVFFSKSRIDEFAPSEAIVSSYKRGTHKKGAVFNLADCHRLIDFFKQSINKHEDWSK |
| | FGFHFSDTKSYEDISGFYREVEQQGYMLSSHPVSSSYIDTLVSEGKLYLFRIWNKDFSESSK |
| | GTPNLHTLYWKMLFDERNLVDVVYKLNGQAEVFYRKASIKPENCIIHKANQPIANKNELN |
| | TKRASTFKYDIIKDKRYTVDKFQFHVPITINFKAAGQNNINPIVQEAIKQDEFSHIIGIDRGER |
| | HLLYLSLIDLKGNIVKQMTLNEIINEYKGQTYKTNYHDLLAKREGDRTEARRSWETIETIK |
| | ELKEGYLSQVVHIISKMMVEYNAIVVLEDLNTGFMRGRQKIERQVYEKFEKMLIDKLNCY |
| | IDKQLSPTDEGGLLHPLQLTCDAQKWKRSHQCGCLFYIPAWNTSKIDPVTGFVNLLDTHY |
| | DTREKARVFFSKFQRISYNAPKGWFEFAFDYNDFTTKAKGTRTQWTLCTQGERIRTFRNP |
| | QKNHQWDDERIMLTDAYKQLFDKYDIDINGNIKEAISSQTDAQFFKDLMGLMKLLLQMR |
| | NSITNSEEDYLLSPVANGTGHFFDSREGISSLPKDADANGAYNIARKGLWVVQKIQETPEG |
| | EKPSLTITNKEWLQFAQTKPYLND |
| 145 | MKEKEQYSDFSRLYPVSKTLRFELKPIGRTMKNIEKNGILERDNQRANDYKIVKEFIDEYH |
| | KQHIKDRLWDFKLPLKSDGRLDSLKEYQELYELSKRDANQESAFTEIKDNLRSIIARRLTH |
| | DSPAYKRIDKKELIREDLLEFLENEEDKEIVRQFADFTTYFTGFHQNRQNMYTAEEKSTAIA |
| | YRLIHQNLPKFMDNMKAFAKIAETSVAEHFADIYEGWKEYLNVGSIEKIFQLDYFSETMTQ |
| | PHIEVYNYIIGKKILEDGTEIKGINEYVNLYNQQQKDKSQRLPFLVPLYKQILSDREKLSWM |
| | AEEFDSDEKMLAAINESYVHLHDLLMGTENESLRSLLSHMKDFNLEQININNDLSLTDISQ |
| | HLFGRYDVFTNGIKDELRAITPRKKKESDEDFEDRISKIFKTQKSFSISLLNKLPQPVMEDGK |
| | PRTVEEYFMSLGAVNTETTQKENLFAQIENAYENARSILQMKDTGDALSQNKQAVAKIKA |
| | LLDAFKDLQHFIKPLLGSGEENEKDELFYGVFQLIWDELDTMTPLYNKVRNWLTRKPYST |
| | EKIKLNFDNAQLLGGWDVNKEPDCTGVLLQKDGFYYLGIMNKKANRIFESKVTPSNEDCY |
| | EKIDYKLLPGANKMLPKVFFSKSRIDEFAPSEAIVDSYRRGTHKKGPDFNLSDCHRLIDFFK |
| | DSIAKHEDWSKFVFHFSETSTYEDISGFYREVEQQGYMLASHPVSVSYVEQMVDEGKLYL |
| | FRIWNKDFSEHSKGTPNLHTLYWKMLFDERNLADVVYKLNGQAEVFYRRASIKPKNRIIH |
| | QANSPIANKNELNEKRTSTFKYDIIKDRRYTVDKFQFHVPITIGFKAIGQNNINPIVQDTIRQ |
| | GGFTHIIGIDRGERHLLYLSLIDLKGNIIKQMTLNDIVNEYNGVLYKTNYRDLLKKREGERT |
| | DARRSWETIETIKELKEGYLSQVVHIISKMMVEYNAIIVLEDLNTGFMRGRQKIERQVYEK |
| | FEKMLIDKLNCYIDKQTNPEDVGGLLHPLQLTCDAQKWKRSHQCGCLFYIPAWNTSKIDP |
| | VTGFVNLFDTRYETREKARLFFSKFQRIDFNTESDWFEFSFDYNDFTTKAEGTRTKWTLCT |
| | YGERIRTFRNPEKNHQWDDERIVLTDEFTQLFERYNIDIQGNLKEAISAQSDAQFYRELLGL |
| | MKLLLQMRNSITNSEEDYLLSPVADESSHFFDSRENVEILPNNADANGAYNIARKGLWVIR |
| | RIQETAENEKISLAISNKEWLQFAQTQPYLND |
| 146 | LQLTDTEDKLSQNKPAVGKIKALLDAFKDLQHFIKPLLGSGEENEKDELFYGAFQLIWDEL |
| | DTVTPLYNKVRNWLTRKPYSTEKIKLNFDNAQLLGGWDVNKEPDCTGVLLRKDGFYYLG |
| | IMNKKSNRIFDADVTPADGICYEKIDYKLLPGANKMLPKVFFSKSRIDEFAPSEAILSSYKR |
| | GTHKKGADFSLSDCHRLIDFFKASINKHEDWSKFGFQFSDTKTYEDISGFYREVEQQGYML |
| | SSHQVSEAYINQMVEEGKLFLFRIWNKDFSEYSKGTPNMHTLYWRMLFDERNLADVVYK |
| | LNGQAEVFYRKASIKAENQIMHPAHHPIENKNTLNEKRSSTFDYDLVKDRRYTVDKFQFH |
| | VPITINFKAIGQTNVNPIVHETIRRGGFTHVIGIDRGERHLLYLSLIDLKGHIVKQMTLNEIIN |
| | EYNGLAHKTNYYDLLVKREGERTTARRSWDTIENIKELKEGYLSQVIHIISKMMVEYNAIV |
| | VLEDLNMGFMRGRQKIERQVYEKFEKMLIDKLNCYIDKQADSQSEGGLLHPIQLANKFES |
| | FRKLGKQSGCLFYIPAWNTSKIDPVTGFVNLFDTRYETREKAKLFFSHFQRICFNAEKDWF |
| | EFSFDYNDFTTKAEGTRTQWTLCSYGTRIRNFRNPLQNHQWDDEEIVLTEAFKALFDKYDI |
| | DIHANLKEAINAQTDAQFFKDLMGLMKLLLQMRNSKTNSEVDYLLSPVADEHGRFFDSR |
| | AGAGSLPDNADANGAYNIARKGLWVIRKIQETPEGEKLSLAITNKEWLEFAQTKPYLND |
| 147 | LGLFLRLRPKLFVILCKSNSNVMRNLTNLYPVSKTLRFELQPIGKTKENIEKNGILQRDEKR |
| | AEDYQKVKNLIDEYHKQFIKDRLWTFELPLEILEEYKELYETPKRDEAAFTEVKDNLRALI |
| | ASQLKAKGSIYDRIFKKELIREDLIEFLDNEEDKEIVRQFADFTTYFSGFHKNRENMYSAEE |
| | KSTAIAYRLIHQNLPKFMDNMKAFALIAKSPVAEHFPDLYSAWEECLNVASIEEMFRLDYF |
| | SQTLTQTGIEVYNYIIGKKILEDGTEIKGINEYVNLYNQQQKDKKERLPLLVPLYKQILSDR |
| | EKLSWLAEEFDSDEKMLNAINELYAHLHDLLMGEENESLHSILLQLKEYDLSQINIANDLS |
| | LTAISQQMFGRYDVFTNGMKDILRTITPHKKKETEEDFEERISKILKIQKSISIAELNKLPQPI |
| | SEDGGKPKLVEDYFMSLGAVDDGVTQKANLFAQIENAHTDALSVLQLTGTGDTLSQNKT |
| | AVAKIKTLLDAFKDLQHFIKPLLGSGEENEKDELFYGSFQLFWDELDAVTPLYNKVRNWL |
| | TRKPYSTEKIKLNFDNAQLLGGWDVNKEPDCTGILLRKDGLYYLGIMNKKSNRIFDASVTP |
| | SDGDCYEKIDYKLLPGANKMLPKVFFSKSRIDEFAPSDAIINSYKRETHKKGANFSLRDCH |
| | RLIDFFKQSISKHEDWSKFGFHFSDTSSYEDISGFYREVEQQGYMLSSHPVSSAYIHQMVDE |
| | GKLFLFRIWNKDFSEYSKGTPNLHTLYWKMLFDERNLADVVYKLNGQAEVFYRKASIKPE |
| | NRIIHPANQDIKNKNALNEKATSRFEYDIVKDRRYTVDKFQFHVPLTINFKATGQANVNPV |
| | VQEAIRKGEFTHIIGIDRGERHLLYLSLIDLKGRIVKQMTLNEIVNEYNGHSHTTDYHGLLA |
| | DREGQRTTARRSWDTIENIKELKEGYLSQVIHVITKMMVEYKAIVVLEDLNMGFMRGRQK |
| | IERQVYEKFEKMLIEKLNCYIDKQADPTDVGGLLHALQLTNKFESFKKLGKQSGCLFYIPA |
| | WNTSKIDPVTGFVNLFDTRYETREKSRLFFSRFDRIAYNQDKDWFEFSFDYDNFTTRAEGC |
| | RTHWTLCTQGTRIRNFRNPQKNNQWDDEEVNLTALFKQLFDLYDIDIHGNLMEAIQRQTE |
| | AKFYQELMHLMKLTLQMRNSRINSEVDYLLSPVADEKGRFFDSRSGDCVLPDNADANGA |
| | YNIARKGLMLIQTIRETPDGEKPSLTITNREWLRFAQEKPYLVD |
| 148 | MKQFTNLYPVSKTLRFELQPIGSTKENIEKNGILSRDEQRAEDYKKVKNLIDKYHKQFIKD |
| | RLWNFQLPLENKGNLDSLEEYRILYETPKRDEAVFTEVKDNLRALIVNQLKAKGSAYERIF |
| | KKELIREDLIEFLDMEEDKKTVRQFADFTTYFTGFNENRANMYSAEEKSTAIAYRLIHQNL |
| | PKFMDNMKAFAQIVQSPVAEHFTDLYSYWEEYLNVASIEEMFQLDFFSQTLTQTGIEVYN |
| | YIIGKKILEDGTEIKGINEYVNYYNQHQKDKKQRLPLLVPLYKQILSDRERLSWLAEEFDSD |
| | EKMLKAINELYVHLHDLLMGKENESLRSLLLKLKEYDLSQINIANNFSLTAICHQMFGRYD |
| | VFINGMKDILRAITPHKKKETEEEFEERISKILKTQKSISIAELNKLPQPVCEDCCKPKLVED |
| | YFMSLGAVDDGVTQKLNLFAQIENAHTDALSVLQLTGTGDTLSQNKPAVAKIKNLLDTFK |
| | NLQHFIQPLLGSGEENEKDELFYGSFQLFWDELDAVTPLYNKVRNWLTRKPYSTEKIKLNF |
| | DNAQLLGGWDVNKESDCTGVLLRKGAYYYLGIMNKKANRIFDACITPSNGDCYEKIDYK |
| | LLPGANKMLPKVFFSKSHIDEYAPSDVIIENYKKGTHKKGADFSLQDCHRLIDFFKQSISKH |
| | EDWSKFGFQFSPTCSYEDISGFYREVEQQGYMLSTHPVSSAYIDEMVAEGKLFLFRIWNKD |
| | FSEYSKGTPNLHTLYWKMLFDKRNLADVVYKLNGQAEVFYRKASIKPDNRIIHPANQDIK |
| | NKNALNENKTSRFEYDIIKDHRYTVDKFQFHVPITINFKAIGQANINPIVNDAIRKGVFTHII |
| | GIDRGERHLLYLSLIDLKGRIIKQMTLNEIVNEYNGHSHATNYRDLLANREGERTTARRSW |
| | DTIENIKELKEGYLSQVIHVITKMMVEYKAIVVLEDLNTGFMRGRQKIERQVYEKFERMLI |
| | EKLNCYIDKQTTPTAEGGLLHALQLTNKFESFKKLGKQSGCLFYIPAWNTSKIDPTTGFVN |
| | LFDTRYETREKSRLFFSRFDRIAYNRDKDWFEFSFDYNNFTTKAEECRTRWTLCTQGTRIIN |
| | FRTPQKNNQWEDEEVNLTVLFKQLFDRYDINIHGNLMETIQQQTEAKFYQELMHLLKLTL |
| | QMRNSRTNSEVDYLLSPVADEHGHFFDSREDIETLPNNADANGAYNIARKGLWVIRKIQE |
| | TPEGERPSLAITNKEWLQFAQTKPYLND |
| 149 | MTQKFDDFIHLYSLSKTLRFEARPIGDTLRNFIKNGLLKRDEHRAESYVKVKKLIDEYHKA |
| | FIDRVLSNGGLNYEDKGEYDSLTEYYVLYSTTRRDETTQKHFKATQQNLRDQIVKKLTDD |
| | DAYKHLFGKELIESYKDKEDKKKLHEADLVQFINTANPKQRLNFSKKEAIDLVKEFCGFTS |
| | YFGDFHKNRKNMYSAEEKSTGIAYRLINENLPKFIDNMESFKKIAAIPEMEDNLKEIHDNF |
| | AEHLNVENIQNMFQLNYYNQLLTQKQIDVYNAIIGGKTDEEHKEKIKGINEYVNLYNQAH |
| | KDAKLPKLKTLFKQILSDRNAISWLPEEFDNDQEALNAILDCYARLSENVLGKENLKRLLC |
| | SLSEYDTKGIFLRNDLQLTSISKKMSGSWTDIPSAIKNDMKDGAPAKKRKESEEDYEKRID |
| | NLFKKLDSFSIGYIDDCLNKFDNNNTFTIEGYFKELGAKDTQSEDIFKQIANAYTDVKPLLN |
| | SPYPKSKNLSQDKENVKKIKRFLDALMSLVHFVKPLLGNGDESNKDEKFYGELSLLWTEL |
| | ETIVPLYNMVRNYMTRKPYSNSKIKLNFENSQLLGGWDVNKEKERASILLRRNGLYYLAI |
| | MDKDSSKLLGKSMPSDGECYEKMVYKQISFNSGFGGFIRKCFNSATELGWKCSPTCLNKD |
| | GKIIILDEEATDIRPELIDNYKSFLDIYEKDGYKYKNFGFHFKKSSEYENINDFFKEVEQQGY |
| | KITFTNVSVAFIDKLVKEGKMYLFQIYSKDFSEYSKGTPNMHTLYWKALFDDRNLKDVVY |
| | KLDGQAEMFFRKKSINCNHPTHPANQPIQNKNKDNKKKESVFKYDLTKDRRYAVDKFMF |
| | HVPIKMNFKSTGTENINLPVREYLKTSNDTHIIGIDRGERHLLYLVVIDLHGNIVEQYSLNDI |
| | VNEYNGNTYRTNYHDLLDAREEDRLKQRQSWQTIENIKELKEGYLSQVIHKITQLMIKYH |
| | AIIVLEDLNMGFMRGRQKVEKQVYQKFEKMLIDKLNYLVDKKADIESTGGLLNAYQLTN |
| | KFPGFKNLGKQSGFLFYIPAWNTSKIDPVTGFVNLLDIRNVDKAKAFFAKFDSIWYNKEKD |
| | WFEFALDYDKFGSKAEGTRTKWTLCTQGKRIKTFRNADENSNWDYQIIDLTKDLKQLFAQ |
| | YNIDINGNLKEAISNQTEKTFFVELLGLLKLTLQMRNSITGTETDYLVSPVADENGNFYDSR |
| | TCGHSLPENADANGAFNIARKGLMIIEQIKASDNLSKLKFDISNKSWLNFAQQKPYKHE |
| 150 | MKRKFDDFIHLYSLSKTLRFEASPIGDTLRNFKKNGLLERDKHRAESYVKVKKLIDEYHKV |
| | FIDRVLNGSVLNYVNKGKYDSLTEYYDLYSVPKKDETSQKHFKAIQQHLRQQIVKKFTDD |
| | KNYKRLFGKELLESYKDKEDKKKLNEADLVQFINAANPEQLLSLSKKEAIDLVQEFSGFTT |
| | YFNEFHKNRKNMYSAEEKSTGIAYRLINENLPKFIDNMKSFKKIVDIPEMKDNLKQIHEYF |
| | VDYLNVENIHEMFQLDYYNQLLTQKQIDVYNAIIGGKTDNEHKEKIKGINEYVNLYNQTH |
| | KDAKLPKLKVLFKQILSDRNAISWLPEEFKDDQEVLNAIKDCYARLSKNVLGDNILKELLC |
| | SLAEYDTKGIFLRNDLQLTDISQKMFGNWSVIPSAIKKDVAPAKKRKELEEDYEKRIDNLF |
| | KKRESFSIDYIDSCLDKFDENNTHTIEGYFATLGAVDTPTTQRENIFAQIANTYTDLEPLLKS |
| | PYSKNKNLSQDKDNVAKIKLFLDALMSLMHFVKPLLGKGDESNKDEKFYGDFTLLWTEL |
| | ETVVPLYNMVRNYMTRKPYSKSKIKLNFDNSQLLGGWDANKESDYASILLRRDGKYYLA |
| | IMDKDSKKLLGKSMPSDGECYEKMVYKLLPGANKMLPKVFFATSRIKDFKPSEQLLENYN |
| | KGTHKKGVNFSISDCHALIDYFKQSINKHEDWKNFNFNFSETSTYEDLSAFYREVEQQGYK |
| | ITFTNVSVSFIDKLVEEGKMYLFQIYNKDFSEYSKGTPNMHTLYWKALFDERNLKDVVYK |
| | LNGQAEMFFREKSIKVSTIHPANRPIQNKNKDNKKKESIFEYDLIKDRRYTVDKFMFHVPIT |
| | MNFKSADTENINLPVREYLQTSDDTHIIGIDRGERHLLYLVVIDLQGNIVEQYTLNDIVNEY |
| | NGNTYRTNYHDLLNAREAERLKARQSWQTIENIKELKEGYLSQVIHKITQLMIKYHAIVVL |
| | EDLNKGFIRGRQKVEKQVYQKFEKMLIDKLNYLVDKKADIETTGGLLNAYQLTSKFESFQ |
| | KLGKQSGFLFYIPAWNTSKIDPVTGFVNRLDTRYHNVDKSKAFFAKFDSIRYNKEKDWFE |
| | FALDYKNFGNKAEGTRTKWTLCTQGKRIKTFRNAEKNSNWDYQIIDLTKELKQLFAHYDI |
| | DINGNLKKAISNQTEKTFFVELMQFLKLTLQMRNSITNTETDYLVSPVADENGNFYDSRKC |
| | GSSLPENADANGAFNIARKGLMIIEQIKASDDLSKLKFDISNKSWLNFAQQKPYKHE |
| 151 | LVQFINTANLKQRLNLSKEEAKDLVQEFCGFTTYFGDFYQNRENMYSAEEKSTGIAYRLIN |
| | ENLPKFIDNMETFKKIAAIPEMEDNLKEIHDNLSEHLNVENIQDMFQLNYYNQLLTQKQID |
| | VYNAIIGGKTDDEHKEKIKGINEYVNLYNQAHKDAKLPKLKTLFKQILSDRNAISWLPEEF |
| | DNDQETLNAIKDCYAHLSGNILKDENLKRLLCSLSEYDTKGIFLRNDSQLTSISKKMSGSW |
| | TDIPSAIKNDMKDGVPAKKRKESEEDYEKRIDNLFKKQDSFSIDYMDACLNKFVENNPYTI |
| | EGYFKELGAKDTQSEDIFKQIENAYTDVKPLLNSTYPKNKNLSQDKENVAKIKRFLDTLMS |
| | LVHFVKPLLGKGDERNKDEKFYGELSLLWTELETIVPLYNMVRNYMTRKPYSNSKIKLNF |
| | DNSQLLGGWDANKESDYSSILLYRDGKYYLAIFDKDSKKLLGKSMPSDGECYEKMVYKL |
| | LPGANKMLPKVFFAKSRIKDFKPSEQLLEKYNKGTHKKGKNFSISDCHALIDFFKQSINKH |
| | EDWKNFDFNFSETSTYEDLNSFYREVELQGYKITFTKVSASFIDKLVEEGKVYLFQIYNKD |
| | FSEYSKGTPNMHTLYWKALFDDRNLKDVVYKLNGQAEMFFRKKSINCNHPTHPANQPIQ |
| | NKNKDNKKKESVFEYDLIKDHRYTVDKFMFHVPITMNFKSTNEKDINLHVREYLQTSNDT |
| | HIIGIDRGERHLLYLVVIDLHGNIVEQYTLNDIVNEYNGNTYRTNYHDLLDAREEDRLKQR |
| | QSWQTIENIKELKEGYLSQVIHKITQLMIKYHAIIVLEDLNIGFMRGRQKVEKQEYQKFEK |
| | MLIDKLNYLVDKKADIESTGGLLNAYQLTNKFASFKKLGKQSGFLFYIPAWNTSKIDPVTG |
| | FVNLLDTRYQNVDKAKAFFAKFDSIRYNKDKDWFEFALDYNNFGSKAEGTRTKWTLCTQ |
| | GKRIKTSFNKMSSKWNNQEIDLTKDLKQLFVQYDIDINGNLKEAISKQTKYTFFVELMGLL |
| | KLTLQMRNSITGTETDYLVSPVADENGNFYDSRTCGPSLPENADANGAFNIARKGLMIIEQI |
| | KASDDLSKLKFDISNKSWLNFAQKKPYKHE |
| 152 | MAKKFEDFTKLYPLSKTLCFEARPIGATKSNIIKNGLLDEDKHRAESYVKVKKLIDEYHKA |
| | FIDRVLADGCLCYKNEGNEDSLEEYYEFYSLSSKDKSDDTRKHFATIQQNLRSKIAETLTK |
| | DKAYANLFGNKLIESHKDKEDKNNIIDSDLIQFVSTATPDQLDSQSKDDATKLIKEFWGFT |
| | TYFTGFFENRKNMYTSEEKSTGIAYRLINENLPKFIDNMESFKKIMEKPEMSANMEELRAN |
| | LEEYLNVESISEMFELNYYNMLLTQKQIDVYNAVIGGKTDEEQDIKTKGINEYVNLYNQQ |
| | HKDAKLPKLKTLFKQILSDRNAISWLPEEFDKDQNVLNAIKDCYVRLTANVLGNNVLNSL |
| | LSTLSEYNTESIFIRNDIQLTNISQKMAGSWNYIQDAIKQDIKNVAPARKRKESEEDYEERIS |
| | KNFKKADSYSIKYIDDCLNRAYKNNTYTVEGYFATLGATNTPSLQRENLFAQIANAYTNIS |
| | SLLSSDYSAEKNLAQDKENVAKIKTLLDCIKSLQHFVKPLLGKGDESDKDERFYGELSML |
| | WKELDTVTPLYNMVRNYMTRKPYSQKKIKLNFENPQLLGGWDANKEKDYASILLRRDG |
| | KYYLGIMDKESKKLLGKPMPSDGDYYEKMVYKFFKDITTMIPKCSTQLKAVKEHFSKSNA |
| | DFVLSGKNFNTPLIISKEVFELNNVKYGQFKKFQKDYVATTNDIEGYAHAVKIWIKFCMDF |
| | LGTYDSTISYDLSSLASNEYTSLDTFYQDVNRLLYAVSFIKVSVSHIDSLVEEGKMYLFQIY |
| | NKDFSEYSKGTPNMHTLYWKALFDERNLADVVYKLNGQAELFYREKSIDCTHPTHPANH |
| | PILNKNKDNEKKESIFEYDLIKDRRYTVDKFMFHVPITMNFKSTGADNINQLVREHLKDAD |
| | APHIIGIDRGERHLLYLVVIDMHGNIKEQFTLNDIVNEYNGNTYRTNYHDLLDAREDARLK |
| | ARQSWQTIENIKELKEGYLSQVIHKITQLMVKYHAIVVLEDLSMGFMRGRQKVEKQVYQ |
| | KFEKMLIDKLNYYVDKKANAEQAGGLLNAYQLTSKFDSFQKLGKQSGFLLYIPAWNTSKI |
| | DPVTGFVNLLDTRYQNVEKAKAFFCKFEAIRYNSNKNWFEFTIDYNNFGQKAEGTRTKW |
| | TLCTQGKRIRTFRNPEKNSEWDNQEIDLTSALKNLFAHYHIDINGNIKEAISAQSDKTFFTEL |
| | LHLLKLTLQMRNSITGTETDYLISPVADDNGYFYDSRTCNDTLPKNADANGAYNIARKGL |
| | MLIEQIKKAKDIANIKFDISNKSWLNFAQQKPYKDE |
| 153 | MIKEFEDFKRLYPIQKTLRFEAKPIGSTLEHLVKSGILDEDEHRAASYVRVKKLIDEYHKAF |
| | IDRVLNDGCLPFKNKGEKNSIEEYYESYTSKDKEEDSKKRFKEIQQNLRSIIVNKLTKDKAY |
| | ANLFGNYLIESHKDKEDKKTMIDSDLIQFIKDADSLELGSMSKDEAIELVKEFWSFTTYFVG |
| | FYDNRKNMYSAEEKSTAIAYRLINENLPKFIDNMEAFKKIISRPEIQANTEQLYSDFAEYLN |
| | VESIQEMFQLDYYDILLTQKQIDVYNAIIGGKTDEKHDIKTKGINEYINLYNQQHKEDKLPK |
| | LKVLFKQILSDRNAISWLPEEFNSDQEMLISIKDCYEKLCVNVLGDKVLKSLLSSLDDYELE |
| | GIFLQNDQQLTNISQKIFGSWSVIQEAIIRNIKNTAPARKHKETEEDYEKRIFSIFKQAGSFSI |
| | KYIDDCLYDLDKNNINTIENYFATLGAENTPEIQRENLFALIKNAYTDVAGLLCSEYPTEKN |
| | LSQDENHVAKIKALLDAIKSLQHFVKPLLGNGDEHDKDERFYGELVSLWTELDTVTPLYN |
| | MVRNRITQKPYSQKKIKLNFENPQLLGGWDANKEKDYSCIILRREGMYYLAIMDKDSRKL |
| | LGKEMPSDGECYEKMVYKLLPGANKMLPKVFFAKSRIEEFMPSEQIIEKYNNGTHKKGKD |
| | FNITDCHNLIDYFKQSINKHEDWSKFGFTFSETSTYEDLSGFYREVEQQGYKLSFTNVSASY |
| | INSLVDEGKMYLFQIYNKDFSEYSKGTPNMHTLYWKALFDEQNLADVVYKLNGQAEIFY |
| | RKKSIDATHPTHPANRPVQNKNKDNKKKESLFEYDLIKDRRYSVDKFMFHVPITMNFKSN |
| | GSENINQQVKEYLQLANDTHIIGIDRGERHLLYLVVIDMHGNIKEQFSLNEIVNTYKGNIYH |
| | TNYHDLLEAREEERLKARQSWQTIENIKELKEGYLSQVVHKITQLMVKYHAIVVLEDLNM |
| | GFMRGRQKVEKQVYQKFEKMLIDKLNYLVNKQANITEAGGLLNAYQLTSKFDSFQKLGK |
| | QSGFLFYIPAWNTSKIDPVTGFVNLLDTRYQNVEKAKAFFSKFDAIRFNQDKDWFEFNLDY |
| | NKFGEKAEGTRTRWTLCTQGKRIYTFRNEDKNSQWDNIEIDLTSEMKSLLELYHIDIQGNL |
| | KEAINSQTDKSFFTKLIHLLKLTLQMRNSITRTETDYLISPVADEDGEFYDSRSCGPELPKNA |
| | DANGAYNIARKGLMLIRQIKEAKELDKIKFDISNKAWLNFAQQKPYKND |
| 154 | MAKIFEDFKRLYPLSKTLRFDAKPVGATLDNIVKSGLLEEDEHRAASYVRVKKLIDEYHK |
| | VFIDRVLDNGCLPLENKGENNSLAEYYDSYVSKSQNEDAKKAFEENQQNLRSIIAKKLTG |
| | DKAYANLFGKNLIESYKDKKDKKKIIDSDLIQFINTADSTQLDSMTQVEAKELVKEFWGFV |
| | TYFYGFFDNRKNMYTAEKKSTGIAYRLINENLPKFIDNMEAFKKVIARPEIQANMEELYSD |
| | FSEYLNVESIQEMFQLDYYDMLLTQKQIDVYNAIIGGKTDDEHDVKIKGINEYINLYNQQH |
| | KDTRLPKLKALFKQILSDRNAISWLPEEFNSDQEVLNAIKDCYERLSENVLGDKVLKSLLG |
| | SLADYSLEGIFIRNDLQLTDISQKMFGNWGVIQNAIMQNIKHVAPARKHKESEEEYEKRIA |
| | GIFKKADSFSISYLNDCLNEADPNNAYFVENYFATFGAVNTPTMQRENLFALVQNKYTEV |
| | AALLHSDYPTAKHLAQDKANVAKIKALLDAIKSLQHFVKPLLGKGDESDKDERFYGELAS |
| | LWAELETVTPLYNMIRNYMTRKPYSQKKIKLNFENPQLLDGWDANKEKDYATIILRRNGL |
| | YYLAIMGKDSKNLLGKAMPSDGECYEKMVYKQFDISKQLPKCTTELKHVRKALVEDAKR |
| | SCLLSDFNNWNKPLNVTRKLWELNNFVWDKKKEDWVLRKKDNETRPKKFHKKYLELTS |
| | DKKGYNQAKNDWIKFTKEFLSSYKKVEAYDIHYKKRYNSVDELYKQLNGDLYAISFTYV |
| | SASFIEQLVSEGKMYLFQIYNKDFSEYSKGTPNMHTLYWKALFDERNLADVVYKLNGQA |
| | EMFYRKKSIENTHPTHPANHPILNKNKDNKKKESLFDYDLIKDRRYTVDKFMFHVPITMNF |
| | KSSGSENINQDVKAYLRHADDMHIIGIDRGERHLLYLVVIDLQGNIKEQYSLNEIVNEYNG |
| | NTYHTNYHDLLDVREEERLKARQSWQTIENIKELKEGYLSQVIHKITQLMVKYHAIVVLE |
| | DLNMGFMRGRQKVEKQVYQKFEKMLIDKLNYLVDKKADASVSGGLLNAYQLTSKFDSF |
| | QKMGKQSGFLFYIPAWNTSKIDPVTGFVNLLDTRYQNVEKAKVFFSKFDAIRYNKDKDWF |
| | EFNLDYDKFGKKAEGTRTKWALCTRGMRIDTFRNKEKNSQWDNQEIDLTAEMKSLLEHY |
| | YIDIHGNLKDAISAQTDKAFFTGLLHILKLTLQMRNSITGTETDYLVSPVADENGIFYDSRS |
| | CGDELPENADANGAYNIARKGLMMIEQIKDAKDLNNLKFDISNKAWLNFAQQKPYKNG |
| 155 | MEFNDFKRLYPLSKTLRFEAKPIGDTLKNIIKNGLLEEDEHRAQSYVKVKKLIDEYHKVFID |
| | RVLNDGCLTIENKGKKDSLEEYYESYMSKSNDENVSKTFKDIQENLRSVIANKLTKDKGY |
| | ANLFGNKLIESYKDKDDTKKIIDSDLIQFINTAEPSNLDSMSQDEAKELVKEFWGFTTYFEG |
| | FHKNRKNMYTSEEKSTGIAYRLVNENLPKFIDNMEAFKKAIAKPEIQANMEELYSNFAEYL |
| | NVESIQEMFQLDYYNMLLTQKQIDVYNAIIGGKTDEDHDVKIKGINEYINLYNQQHKDEK |
| | LPKLKALFKQILSDRNAISWLPEEFNSDQEVLNAIKDCYERLSENVLGDKVLKSLLCSLSDY |
| | NLDGIFVRNDTQLTDISQKMFGNWSVIQNAIMQNIKKKKLARKRKESEEDYEKRIPDIFKK |
| | ADSFSIQYINDSLNKMDDNNLHAVDEYFATLGAVNTPTMQHENLFALIQNAYTDISDLLD |
| | TPYPENKNLAQDKTNVAKVKALLDAIKSLQHFVKPLLGKGDESDKDERFYGELASLWTEL |
| | DTVTLLFNMVHNYMTRKPYSQKKIKLNYKNTQLLAGWDANKEKEHAAIILRRNGMYYIA |
| | IMDKDSKNLLDKAMPSDGECYEKMVYKQFDISKQLPKCTTELKRVRKALIEDAKRSCLLS |
| | DSKDWNKPLNVTRKLWELNNYVWDKKKADWVLRKKENETRPKKFHKKYLELTSDKKG |
| | YNQAKNDWIKFTKEFLSSYKKVKDYDIHYKKRYNSVDELYKQLNSDFYTISFTYVSVSFID |
| | KLVNEGKMYLFQIYNKDFSNYSKGTPNMHTLYWKALFDERNLADVVYKLNGEAEMFYR |
| | KKSINNTHPTHPANHPIQNKNKDNKKKESVFEYDLVKDYRYTEDKFLFHVPITMNFKSVG |
| | SENINQQVKEYLQQADDTHIIGIDRGERHLLYLVVIDMEGNIKEQFSLNEIVNEYNGNTYRT |
| | NYHDLLDVCADKRLKASQSWQTIENIKELKEGYLSQAIHKITQLMVKYHAVVVLEDLNK |
| | GFMRGRQKVEKQVYQKFEKMLIDKLNYLVDKKADAAQSGGLLNAYQLTSKFDSFQKLG |
| | KQSGFLFYIPAWNTSKIDPVTGFVNLFDTRYTNADKALKFFSKFDAIRYNEEKDWFEFEFD |
| | YDEFTQKAHGTRTKWTLCTYGMRLCSFKNPAKQYNWDSEVVALTDEFKRILGEAGIDIHE |
| | NLKDAICNLEGKSQKYLEPLMQFMKLLLQLRNSRKNPEEDYILSPVADENGVFYDSRSCG |
| | DKLPENADANGAYNIARKGLMLIRQIKKAKELDKVKFDISNKAWLNFAQQKPYKNE |
| 156 | MEFNDFKRLYPLSKTLRFEAKPIGSTLNNIIKSGLLEEDEHRAQSYVKVKKLIDEYHKVFID |
| | RVLDDGCLTIENKDKKDSLEEYYESYMSKSNDENVSKTFKEIQENLRSVIAKKLTDDKAY |
| | ANLFGKNLIESYKDKDDKNKIIDSDLIQFINTAEPSQLDSMSQDEAKELVKEFWGFTTYFV |
| | GFFDNRKNMYTSEEKSTGIAYRLVNENLPKFIDNMEAFKKAIAKPEIQANMGELYSNFAEY |
| | LNVESIQEMFQLDYYNMLLTQKQIDVYNAIIGGKTDEEHDVKIKGINEYINLYNQQHKDEK |
| | LPKLKALFKQILSDRNAISWLPEEFNSDKEVLNAIKDCYERLSENVLGDKVLKSLLCSLSDY |
| | NLNGIFVRNDLQLTDISQKMFGNWSVIQNAIMQNIKNVAPARKRKESEEDYEKRISDIFKK |
| | ADSFSIQYINDCLNEMDDNNLHAVDGYFATLGAVNTPTMQRENLFALIQNAYTDISNLLD |
| | TPYPENKNLAQDKTNVAKVKALLDAIKSLQHFVKPLLGMGDESDKDERFYGELASLWTE |
| | LDTVTPLYNMIRNYMTRKPYSEKKIKLNFENPQLLGGWDANKEKDYATIILRRNGMYYLA |
| | IMNKDSKKLLGKTMPSDGECYEKMVYKFFKDVTTMIPKCSTQLKDVQAYFKVNTDDFVL |
| | NSKAFNKPLTITKEVFDLNNVLYGKFKKFQKGYLSATGDTAGYTHAVNVWINFCMDFLN |
| | SYESTCMYDFTSLKSESYLSLDAFYQDANLLLYKLSFTNVSVSFIDKLVDEGKMYLFQIYN |
| | KDFSDYSKGTPNMHTLYWKALFDERNLVDVVYKLNGQAEMFYRKKSIDYTHPTHPANHP |
| | IQNKNKDNKKKESVFEYDLVKDRRYTVDKFLFHVPITMNFKSVGSENINQQVREYLQQAD |
| | DTHIIGIDRGERHLLYLVVIDMQGNIKEQFTLNEIVNEYNGNTYRTNYHDLLDTREEERLT |
| | ARQSWQTIENIKELKEGYLSQVIHKITQLMVKYHAVVVLEDLNKGFMRGRQKVEKQVYQ |
| | KFEKMLIDKLNYLVDKKADATQSGGLLNAYQLKSKFDSFQKLGKQSGFLFYIPAWNTSKI |
| | DPVTGFVNLLDTRYQNTEKAKAFFSKFDAIRYNADKDWFEFNLDYDKFGTKAEGTRTTW |
| | TLCTQGNRICTFRNAEKNSQWDNQEIDLTREMKSLFEHYHINICGNLKEEICSQTDKAFFTG |
| | LLHILKLTLQMRNSITGTETDYLVSPVADENGVFYDSRSCGDMLPKNADANGAYNIARKG |
| | LMLIGQIKETKDLANFKYDISNKAWLNFAQQKPYKNE |
| 157 | MDKKFEDFKRLYPLSKTLRFEAKPIGSTLDNIIKSGLLDEDEHRAVSYVKVKKLIDEYHKSF |
| | IDRVLDEGCLPFENNGEKDSLEEYYESYKLKSNDENANKTFKEIQQNLRSVIANKLTDDKA |
| | YANLFGNKLIESYKDKEDKKKTIDSDLIQFINTAEPSQLDSMSQDEAKELVKEFWGFTTYF |
| | VGFFDNRKNMYTSEEKSTGIAYRLVNENLPKFIDNMEAFKKVIAKSEIQANIEELYSNFAE |
| | YLNVESIQEMFQLDYYNMLLTQKQIDVYNAIIGGKTDEKHDVKIKGINEYINLYNQQHKD |
| | EKLPKLKALFKQILSDRNAISWLPEEFNDDQEVLNAIKDCYERLSENVLGNKVLKSLLCSL |
| | ADYNLDDIFIRNDLQLTDISQKMFGNWSVIQDAIIQNIKNVAPARKRKESEEDYEKRISGIF |
| | KKADSFSILYINSCLNEMDDNSLHAVDGYFATLGAVNTPTMQRENLFALIQNAYTDISDLL |
| | NTKYPANKNLAQDKTNVAKVKALLDAIKSLQHFVKPLLGKGDESDKDERFYGELASLWT |
| | ELDTVTPLYNMIRNYMTRKPYSEKKIKLNFENPQLLGGWDANKEKDYSTIILRRNGMYYL |
| | AIMNKDSRRLLGKAMPSDGECYEKMVYKLLPGANKMLPKVFFAKSRIDDFKPNIQIVENY |
| | NNGTHKKRKNFNIQDCHDLIDFFKQSIKKHEDWSKFSFNFSDTSTYEDLSGFYREVEQQGY |
| | KLSFMNVSVSFIDKLVDEGKMYLFQIYNKDFSEYSKGTPNMHTLYWKALFDERNLADVV |
| | YKLNGQAEMFYRKKSIDYTHPTHPANHPILNKNKDNKKKESLFEYDLIKDRRYTVDKFLF |
| | HVPITMNFKSVGSENINQQVREYLQQADDTHIIGIDRGERHLLYLVVIDMQGNIKEQFTLN |
| | EIVNEYNGNTYRTNYHDLLDIREEERLAARQSWQTIENIKELKEGYLSQVIHKITQLMVKY |
| | HAIVVLEDLNMGFMRGRQKVEKQVYQKFEKMLIDKLNYLVDKKADATQPGGILNAYQL |
| | TSKFDSFQKLGKQSGFLFYIPAWNTSKIDSVTGFVNLLDTRYQNTEKAKVFFSKFDAIRYN |
| | EEKDWFEFYLDYDKFGSKAEGTRTKWTLCTQGKRIRTFRNPDKNSQWDNQEVDLTREMK |
| | SLFEHYHINICGNLKEEICSQTDKAFFTGLLHVLKLTLQMRNSITGTETDYLVSPVADEEGN |
| | FYDSRYCNITLPKNADANGAYNIARKGLMLVKQIKAATDLANFKYDISNKAWLNFAQQK |
| | PYKNE |
| 158 | MKKSSLQDFTNQYSLSKTLRFELIPQGETLEHIEKNGLLSQDEHRAESYIIVKKIIDEYHKAF |
| | ITKALDGVKLNSLEDYFLYYQLPKRDEEQKKKFEEIQTKLRKQIADRFAKQESFKNLFAKE |
| | LIKDDLINFVKSNDDKLLVAEFQNFTTYFTGFHENRKNMYSAEDKSTAIAFRLIHQNLPKFI |
| | DNMRAFDKIKISKVKDSFKTILADDELGAIIQVIAVEDVFTLNYFNDTLTQLGIDKYNQLIG |
| | GFTSEDGKIKIKGLNEYINLYNQTAKKEERLPKLKPLYKQILSDRSTASFIPEAFSNDNEVLE |
| | SIEKLYQEINDLVLNKRVKGEHSLKELLQSLNEYDVSKVYLRNDLSLTDISQKMFGDWGV |
| | FQKGMQTWYAVNYKGKNKAGTEKYEDEQKKYFSNQDSYSIGFINECLLLLDTVYQKRIE |
| | DYFKLLGERNTEEEKSENLFVLIEKNYNGIKDLLNNPYPHDKNLAQDQANVDKIKNFLDV |
| | VKTLQWFIKPLLGKGNEAEKDERFYGEFTSLWTTLDQVTPLYNKVRNYMTQKPYSTEKIK |
| | LNFENSTLLDGWDVNKEVDNTAMIFRKNGLYYLGIMNKKHNKIFKTDIANTGGECYEKM |
| | EYKLLPGANKMLPKVFFSNSRIDEFKPGTELLENYKNETHKKGDNFNLNDCHHLIDFFKTS |
| | INKHEDWKHFGFQFSDTKTYNDLSGFYREVEQQGYKITYKAISENYIAQMIAEGKLYLFQI |
| | YNKDFSPYSKGMPNMHTLYWKMLFDAVNLKNVVYKLNGQAEVFYRKLSIKAENIITHKA |
| | NVPIHNKNEENEKKQQSRFDYDIIKDKRYTMDKFQFHVPITMNFKAKGLNNINIEVNQYLK |
| | KESDIHIIGIDRGERHLLYLTLIDGKGNIKQQFSLNEIINEYQGKTYKTNYHDLLDKKEGDR |
| | DDARRNWKTIETIKELKEGYLSQVIHKISELMVEHNAIVVLEDLNMGFMRGRQKVEKQVY |
| | QKFEKMLIDKLNYLVDKKKNPTDLGGTLNAYQLTNKFESFQKMGKQSGFLFYVPAWNTS |
| | KMDPVTGFVNLLDTRYENIEKAKTFFSKFDSIHYNPLKKYVEFECDYNRFTTKAEGTQTK |
| | WTLCTYKERIETFRDPTQNSQWKSREIVLTDEFISLFEQYGIAYKNKEELKDAIARQTEKVF |
| | FERLLHLLKLTLQMRNSITGTETDYLISPVANAKGEFYDSRTASETLPKNADANGAYNIAR |
| | KGLWVVEQIKQADDLKKLKLAISNKEWLGFVQNYGK |
| 159 | MGWRNGFQKILILINNKKMGNTNLFKGFTNFYPVSKTLRFELKPIGKTLEHIEKNGLLLQD |
| | EHRAESYVTVKKIIDEYHKAFIAKALDGLVLNVLEDYHLYYQLPKRDEAQNKKFEELQTE |
| | MRKQIADRFTKQDGFKNLFAKELIKEDLKAFVQTLEDRQLVEEFGNFTTYFTGFHENRKN |
| | MYSAEDKSTAIAYRLIHQNLPKFVDNMKAFDKIRNSAVKEKFALIISDDELGPIIQVKDIEE |
| | VFCLDYFNETLTQKGIDKYNQLIGGYMPEDGKEKKKGLNEYINLFNQTAKKEERIPKLKPL |
| | YKQILSDRSTASFIPEEFECDNEVLESIEKLYQEINKHALPQLKGLMNNLHDFDLHKIYLRN |
| | DLSLTDISQKMLGDWGAFQKAMNKWFDLNYKGKAKPGTEKYEEEQKKYFRNHESYSIGF |
| | INDCLAKSDIAEHHKKIEDYFKRAGEQINETENLFTLVEKGYSTVNDLLNNPYPKEKNLSQ |
| | DQQNVDKIKAFLDGIKALQWFIKPLLGKGNEAEKDERFYGEFAMLWTTLDQITPLYNKVR |
| | NYMTQKPYSTEKIKLNFENSYFLNGWAQDYESKAGLIFIKDGNYYLGINNKKLTIEEKELL |
| | KGTDAKRIILDFQKPDNKNIPRLFIRSKGDNFAPAVEKYNLPIKDVIEIYDSGKFKTDYRKT |
| | NEEDYTKSLHKLIDYFKEGFSKHESYKHYPFSWKSTTEYKDIAEFYNDVEVSCYQVFEEGV |
| | NWGKIMDFVDQGKLYLFQIYNKDFSPYSKGTPNMHTLYWKMLFDAENLKDVVYKLNGQ |
| | AEVFFRKSSIKAENKVVHKAEGSIPNKNELNAKKQSTFDYDIIKDRRYTTDKFQFHVPITM |
| | NFKARGLNNINTEVNQLIKKENEIHIIGIDRGERHLLYLTLIDSKGSIKQQFSLNEIINQYNGQ |
| | NYKTNYHNLLDKKEGGRDEARRNWKTIETIKELKEGYLSQVIHKIAELMVEYNAIVVLED |
| | LNMGFMRGRQKVEKQVYQKFEKMLIDKLNYLVDKKKKAGEFGGTLKAYQLTNKFESFQ |
| | KMGKQSGLLYYVPAWNTSKMDPVTGFVNLLDTRYENMEKAKQFFGKFEAISYKQTKGY |
| | FEFEFDYMKYTNKAEGTKTRWTLCTNNERIETYRNPEKNSQWDSREVGLTKEFVSLFEQF |
| | GINFKDNAGLKEAICRQTEKAFYERLLHLLKLTLQMRNSITGTEIDYLISPVANDKGEFYDS |
| | RTAAEILPQNADANGAYNIARKGLWVIDQIKQADDLKKLKLAISNKEWLGFVQKDV |
| 160 | MKNLTEFTGLYPVSKTLRFELKPQGRTLEYIEKNGLLEQDEHRASSYILVKKIIDDYHKAFI |
| | ANALRDFKLYSLEDYYLYYNIQKRDDEQKKKFEDIQSKLRKQIADRFTKEESFKNLFAKEL |
| | IKENLIEFVQTVEDRELIKEFESFTTYFTGFHENRKNMYSAEEKSTAIAYRLIHQNLPKFIDN |
| | MRVFEKIANSPVKDKFQTILSDNQLGPVIQVMAVEDMFRLDYFNETLTQIGIDKYNSLCGG |
| | FSPNEGKEKIQGLNEYINLYNQTAKKEERIPKLKPLFKQILSDRSTASFIPDEFENDSEVLESI |
| | ELFYQEVNEQVINKNVEGEHSLKELLKSLPEYELTKIYLRNDLSITDISQKIFGDWGVFQKA |
| | MNTWFELNYNGKAKFGTEKYEEEQRKYFANLDSFSIGFINECLLQLDTPYHKNIADYFAL |
| | RGKTDTETQDLFAVLEDKYNAVTDLLNNPYPQDQDLAQDQKQVDKLKELLDAVKAIQW |
| | FIKPLLGKGNEADKDERFYGEFTSLWITLDQITPLYNKVRNYMTRKPYSTDKIKLNFENSY |
| | FLNGWAQDYESKAGLIFTKDGNYYLGINDKKLSNEDKTLLKSNSELNLAKRIVLDFQKPD |
| | NKNIPRLFIRSKGNNFAPAVEKYNLPIHEVIEIYDNGKFKTEYRKINETDYLKSLHLLIDYFK |
| | IGFSKHESYKHYPFSWKNTTEYKDIAEFYHDVEVSCYQVFEENVNWDTLMNFVDEGKLY |
| | LFQLYNKDFSPNSKGTPNLHTLYWKMLFDADNLKDVVYKLNGQAEVFFRKSSIKPENIVL |
| | HKANEAVNNKNEQNTKKQSRFEYDIIKDKRYTVDKFQFHVPITMNFKARGLNNINTEVNQ |
| | WLQKSDNVHIIGIDRGERHLLYLTLIDSKGNIKQQFSLNEIVNEYEGKTYKTDYHKLLDNR |
| | EGNRDEARKNWKTIETIKELKEGYLSQVIHKISELMVEYNAIVVLEDLNMGFMRGRQKVE |
| | KQVYQKFEKMLIDKLNYLVDKKQNPAEMGGTLHAYQFTNKFESFQKMGKQSGMLFYVP |
| | AWNTSKMDPVTGFVNLFDTRYENMEKARSFIGKFDTIRYNPKKEYFEFDFDYNKFTAKAE |
| | GTRTRWTLCTNDTRIETFRNPAKNSQWDNREIILSDEFINLFKLYNIDYQNSDLKVQICKQT |
| | EKAFFERLLHLLKLTLQMRNSMTGTEVDYLISPVTNSRGEFYDSRTASDILPKNADANGAY |
| | NIARKGMWVIEQIRKATDFRKLKLAISNKEWLSFVQH |
| 161 | MKRFTNLYQLSKTLRFELKPIGKTLENIEKHGLLEQDTHRAESYVKVKDIIDEYHKAFIEEY |
| | LNTFADSSETYAEQNKNFVKLLQELYTNYMCKTKDETQQKLLTESQAKLRKIIAKSFNND |
| | KYKRLFGKELIKEELIDFLKDDVEDITLVQEFKDFTTYFTGFHENRKNMYSDEDKSTAIAY |
| | RLIHENLPRFIDNILVFEKIAQSDVAQKFTELYKNFQSYLNVKEISEMFKLGYYNMVLTQTQ |
| | IDVYNAIIGGKTIEDNDIKIKGLNEYINLYNQQQEDKHNRLPKLKPLYKQILSDRNAISWLP |
| | EQFDANEKGGKVLEAIQKAYNELEQQILNNSNEAEHSLPELLKLLSNYDLNKIYIPNDAQL |
| | TDISQKVYGHWNIISKALIEDLKLTTPRKSRKETDEKYEERLNKILKSQSSFSIRKITDSVHN |
| | TYPEIKSSIITYFENIGNIDNEEENIISKITNSYNIAKDLLNTPYLGNNLSQDTVNVEKIKNLLD |
| | AIKDLQHFIKPLLGKGDESEKDEKFYGEFTLLWDELNNITPLYNMVRNYMTRKPYSTEKIK |
| | LNFENSTLLDGWDLNKETDNTSVILRKDGMYYLAIMNKKHNRVFNIDSIPTEGDCFEKME |
| | YKLLPGANKMLPKVFFSKSRIDEFAPSKQLIEKYQSGTHKKGDNFSLIDCHNLINFFKDSIN |
| | KHEDWKKFNFNFSDTNTYEDLSNFYREVEKQGYKISFRNVSSEYINSLVEDGKIYLFQIYN |
| | KDFSSYSKGTPNMHTLYWKMLFDETNMSDVCYKLNGQAEIFFRKSSIKAEHPTHPANQPI |
| | ENKNTLSNKKQSVFTYDLIKDKRYTIDKFHFHVPITMNFKGIGINNINNIVNQFIQEQEDLHI |
| | IGIDRGERHLLYLTVIDLQGNIKEQYSLNEIINNYNGNTYKTNYHDLLEKREKERMDARQS |
| | WKSIESIKELKEGYLSQVIHKITKLMIKYNAIVVLEDLNIGFMRGRQKVEASVYQKFEKMLI |
| | DKLNYLVDKKKQPEELGGTLNALQLTNKFESFQKLGKQSGFLFYTQAWNTSKIDPVTGFV |
| | NLFDTRYETREKAKEFFKKFDSICYNSEKDWFEFSFDYNNFTTKAEGTRTNWTLCTYGKRI |
| | ETFRDEKQNSQWASNEINLTDKFKEFFAKYNIDINANLKESITAQESADFFKGILALLKLTL |
| | QMRNSMTGTDVDYLQSPVADNNGVFFNSQECDNSLPQNADANGAYNIARKGLWIVNKIK |
| | ISNDLSNLNFAISNKEWLQFAQEKPYLLND |
| 162 | MASLKKFTRLYPLSKTLRFELIPLGLTADHIGKSGILSQDEHRAESYKKVKKIIDEYHKAFIE |
| | KVLNNIHLQYDNIEQNNSLEEYFLYYMIKNKDEKKEKIFEEIQKKLRKQIADRFIDDPSFKN |
| | IDKKELIRSDLKDFVCSQEDLQLVDEFKDFTTYFTGFHENRKNMYSSEAQSTAIAFRLIHEN |
| | LPKFIDNIQVFNKVAASSVSEFFTELYANFEECLTVTEIAEMFKLEYFNSVLTQKQIDVYNFI |
| | LGGKSIEGGSKIKGLNEYINLYNQQQKDKSKRLPKFKPLFKEILSDRNSISWLPEKFKSDEE |
| | VLETIEKAYQELNEHVLNRNVGGEHSLKELLVRLEDFNLDKIYVRNDQQLTDISQKIFGHW |
| | GTISKALLEELKNEVPKKSNKETDEAYEERLNKILKSQGSVSIALINNSIQKLNIEEKKTVNS |
| | YFSLNSNICPKDNLYTRIENAYLEVKDLLNTPYTGKNLAQDKLNVEKIKNLLDAIKSLQHF |
| | VKPLLGDGKEPEKDEKFYGEFLSLWEELDKITPLYNMVRNYMTQKPYSTEKIKINFENSTL |
| | MDGWDVNKERDNTSVILRKDGLYYLAIMNKKNNQVFDAHNTPSNGICYEKMEYKLLPG |
| | ANKMLPKVFFSKSRIHEFAPSKKLIENYKNETHKKGTTFNLDDCHKLIDFFKTSIKKHEDW |
| | NRFEFKFSDTTTYEDLSGFYKEVEQQGYKISFRNVSADYIDNLVKEGKIYLFQIYNKDFSPY |
| | SKGTPNLHTLYWKMIFDERNLANVVYKLNGQAEVFFRKSSISYDKPTHPANQEIDNKNILN |
| | KKKQSIFSYDLIKDKRYTVDKFQFHVPITMNFKSTGQDNINLSVNEYIRQSDDLHIIGIDRGE |
| | RHLLYLTVIDLEGRIKEQYSLNEIVNIYNGNEYHTNYHDLLSKREDEREKARQSWQTIENIK |
| | DLKEGYLSQVIHKISELMIKYNAIVVLEDLNIGFMRGRQKVEASVYQKFEKMLIDKLNYLA |
| | NKKIDPEEEGGILNAYQLTNKFTSFQKIGKQSGFLFYTQAWNTSKIDPSTGFVNLFDTRYET |
| | REKSKMFFSKFDSIKYNKDKDWFEFIFDYTNFTTKAEGTRTQWTICSYGKRIETLRDENKN |
| | SNWVSTEIDLTQSFKNFFTKYGIDINDNLKEFIVQQDTSEFFKGILYLFKLTLQMRNSAIGK |
| | DIDYIISPIADEKGIFYNSNECDSSLPKNADANGAYNIARKGLYIVRKIKHSDELKNLNLAIT |
| | NKEWLQFAQSKPYINK |
| 163 | MKKLNAFSRIYPLSKTLRFELRPIGKTLEHIEKSGILSQDQHRAESYVEVKKIIDEYHKAFIE |
| | NVLKDFRFSENRGEKNSLEEFLVYYMCKSKDETQKRQFADIQDKLRKQIAKRFSDDDRFK |
| | RIDKKELIKEDLLSFVEDVEKRQLIEEFKDFTTYFTGFHENRKNMYTDEAQSTAIAYRLIHE |
| | NLPKFIDNIMVFDKVAASPIAKYFAELYSDFEEYLNVSELGEMFRLDYYNIVLTQTQIDVY |
| | NAVVGGRTLDDGTKIQGLNEYINLYNQQQKDKSARLPKLKPLYKQILSDRNAISWLPEQF |
| | QSDEKVLEAILKAYQELDEQVLNRKKEGEHSLKELLLSLSNYDLTKIYIRNDTQMTDISQK |
| | AFGHWDVIPKALLEQLKKEVQKKSKESEEAYEERLNKIIKSQGSIPIALINQGVQKQNSEEQ |
| | NTLQTYFASLGAVETESVKKENLFTQIENAYAEVKDLLNTPYSGKNLAQDNVAVEKIKTL |
| | LDAIKALQHFVKPLLGDGTESEKDEKFYGEFSMLWEELDKITPLYNMVRNYMTRKPYSTE |
| | KIKLNFENSTLMNGWDLNKEQDNTTVILRKDGIYYLAIMDKKHKKVFDEKNILGSGECFE |
| | KMEYKFFKDLTTMVPKCTTQLKVVKEHFLTHSEPYTISKDVFYSKFEITKEEYELNNVLYN |
| | GKKKFQKDYLRQTGDEKGYKDALTKWIRFCLRFLAQYKSTMIYDISSFQVDCKINSYTSID |
| | EFYSEINLYLYNITFRNVSVDYINSLVEEGKIYLFQIYNKDFSPYSKGTPNLHTLYWKMLFD |
| | EKNLADVVYKLNGQAEVFYRKSSIICERPTHPANQAINNKNVLNKKKHSTFVYDLVKDKR |
| | YTVDKFQFHVPITMNFKSTGGDNINLLVNEYIQQSDDLHIIGIDRGERHLLYLTVIDLQGRI |
| | KEQYSLNEIVNTYNGNEYRTNYHDLLSKREDERMKARQSWQTIENIKELKEGYLSQVIHKI |
| | SELIVKYNAIVVLEDLNMGFMRGRQKVESSVYQKFEKMLIDKLNYLVDKKKNPEEDGGV |
| | LNAYQLTNKFESFQKVGKQSGFLFYTQAWNTSKIDPVTGFVNLFDTRYETREKAKDFFGK |
| | FDAIRYNTAKDWFEFAFDYSNFTSKAEGSRTNWTLCTYGERIEKFRDEKQNSNWASRGIN |
| | LTDKFKELFAEYKIDIQTDLKEVISRQDSADFFKRLLYLLKLTLQMRNSETGTEVDYMQSP |
| | VADANGNFYNSETCDDSLPKNADANGAYNIARKGLWIVQQIKATDDLKNVKLSISNKEW |
| | LKFAQEKPYLNE |
| 164 | MKKLNAFSRIYPLSKTLRFELRPIGKTLEHIEKSGILSQDQHRAESYVEVKKIIDEYHKAFIE |
| | NVLKDFRFSENRGEKNSLEEFLVYYMCKSKDEMQKRQFADIQDKLRKQITQRFSDDDRFK |
| | RIDKKELIKEDLLSFVEDVEKRQLIEEFKDFTTYFTGFHENRKNMYTDEAQSTAIAYRLIHE |
| | NLPKFIDNIMVFDKVAASPIAEHFAKLYSDFEEYLNVSELGEMFRLDYYNIVLTQTQIDVY |
| | NAIVGGKTLEDGKKIQGLNEYINLYNQQQKDKSARLPKLKPLYKQILSDRNAISWLPEQFQ |
| | SDEKVLEAIQKAYQDLEEQVFNRKKEGEHSLKDLLLSLSDYDLSKIYIRNDTQMTDISQKA |
| | FGHWDVIHKALLEQLKEDVQKKPKKESDEAYEERLNKIIKSQGSIPIALINQGVQKQNSEE |
| | QNTLQTYFASLGAVETESVKKENLFTQIENAYAEVKDLLNTPYSGKNLAQDNVAIEKIKTL |
| | LDTIKALQHFVKPLLGDGTESEKDEKFYGEFSMLWEELDKITPLYNMVRNYMTRKPYSTE |
| | KIKLNFENSTLMNGWDLNKEQDNTTVILRKDGMYYLAIMNKKHNRVFDVKNISKNGECF |
| | EKMEYKLLPGANKMLPKVFFSKSRIDEFAPSEQLLENYNKGTHKKGNLFNLSDCHALIDFF |
| | KASINKHKDWSKFGFKFSDTNTYEDLSGFYREVEQQGYNISFRNVSVDYINSLVEEGKIYL |
| | FQIYNKDFSPYSKGTPNLHTLYWKMLFDEKNLADVVYKLNGQAEVFFRKSSIICDKPTHPA |
| | NQPIDNKNALNNKQQSVFEYDLVKDKRYTVDKFQFHVPITMNFKSTGGDNINLLVNEYIR |
| | QSDDLHIIGIDRGERHLLYLTVIDLQGRIKDKEQYSLNKIVNTYNGDEYPTNYHDLLSKRED |
| | ERMKARQSWQTIENIKELKEGYLSQVIHKISELIVKYNAIVVLEDLNMGFMRGRQKVESSV |
| | YQKFEKMLIDKLNYLVDKKKNPEEDGGVLNAYQLTNKFDSFQKLGKQSGFLFYTQAWNT |
| | SKIDPVTGFVNLFDTRYETREKAKDFFGKFDAIRYNTAKDWFEFAFDYSNFTSKAEGSRTN |
| | WTLCTYGERIEKFRDEKQNSNWASQGINLTDKFKELFAKYKIDIQADLKEAISQQDSADFF |
| | KGLLYLLKLTLQMRNSEIGTEIDYMQSPVADANGNFYNSDTCDDSLPKNADANGAYNIAR |
| | KGLWIVQQIKAADDLKNVKLSISNKEWLKFAQEKPYLNE |
| 165 | MFIMTSLKRFTRVYPLSKTLRFELKPVGKTLDHIVSSGLLEQDQHRAGSYVEVKKIIDEYH |
| | KAFIESSLDDFELQYYNEGKNNSLEEFYSYYMCRSKDETQKKLFEENQDKLRKQIADRLSK |
| | DERFKRIDKKELIEKDLIDFVKKPEERQLLEEFKGFTTYFTGFHENRKNMYSAEAQSTAIAY |
| | RLIHENLPKFIDNIMVFDKVAASPVADSFAELYANFEEYLNVTEIAEMFNLAYYNVVLTQS |
| | QIDVYNAIIGGKTFENGVKIKGLNEYINLYSQQQKDKSARLPKLKPLYKQILSDRNAISWLP |
| | EYFSEDEKLLEAIQKSYQELDEQVFNRKREGEHSLKELLLGLEGFDLSKIYIRNDLQLTDIS |
| | QKVYGSWSVIQKALLEELKGEVQKKSKKETDEAYEDRLNKILKSQGSISIALINDCVHKLN |
| | SEEQNTIQGYFATLGAVDNQILQKENLFVQIENAYTEIKDLLNTPYQGRNLAQDKVNVEKI |
| | KNLLDSIKSLQHFVKPLLGDGSEAEKDEKFYGEFVALWDELDKITPLYNMVRNYMTRKPY |
| | STEKIKLNFENSTLMDGWDLNKEQANTTVILRKDGLYYLAIMNKKNNKVFDVKNISSKGE |
| | CYEKMEYKLLPGANKMLPKVFFSKSRIHEFAPSEQLLENYNNETHKKGATFNLSDCHALI |
| | DFFKASINKHEDWSKFGFNFSDTSSYEDLSGFYREVEQQGYKISFRNVSVDYVDSLVEEGK |
| | IYLFQIYNKDFSLYSKGTPNLHTLYWKMLFDEKNLADVVYKLNGQAEVFFRKSSINYERPT |
| | HPANQPIDNKNPQNEKKQSVFNYDLIKDKRYTVDKFQFHVPITMNFKSTGSENINQSVNEH |
| | IQKSDDLHIIGIDRGERHLLYITVIDLKGRIKEQFSLNEIVNHYNGKNHCTDYHALLSKREEE |
| | RMKARQSWQTIESIKELKEGYLSQVVHKISELMVKYNAIVVLEDLNMGFMRGRQKVEAS |
| | VYQKFEKMLIDKLNYLADKKKGPEEEGGILNAYQLTNKFVSFQKMGKQSGFLFYVPAWN |
| | TSKIDPVTGFVNLFDTRYETREKAKAFFAKFESIRYNEDKDWFEFAFDYSKFTSKADGSCT |
| | KWTVCTYGKRIETFRDEKQNSNWVSKEVCLTEKFKDFFAKYGIELRSNLKEYIISQDSADF |
| | FKGLLSLLKLTLQMRNSETGTDVDYLQSPVADANGEFYNSENCDESLPENADANGAYNIA |
| | RKGLWVVKQIKGADDLKNLKLAISNKEWLQFVQAKPYLND |
| 166 | MKTFQQFSRVYPLSKTLRFELKPIGSTLEHINKNGLLDQDQHRAKSYIQMKNIIDEYHKEFI |
| | EDVLDDLELQYDNEGRNNSISEFYTCYMIKSKDDNQRKLYEKIQEELRKQIANAFNKSDIY |
| | KRIFSEKLIKEDLKNFITNQKDNDKREQDIQIIEEFKNFTTYFTGFHENRKNMYTSEAQSTAI |
| | AYRLIHENLPKFIDNIMVFDKVAASPIADSFSELYTNFEECLNVMSIEEMFKLNYFNVVLTQ |
| | KQIDVYNAIIGGKTIDNTNIKIKGLNEYINLYNQQQKDKSARLPKLKPLYKQILSDRNAISW |
| | LPEQFESDDKLLEAIQKAYQELDEQVLNRKIEGEHSLRELLVGLADYDLSKIYIRNDLQLTD |
| | ISQKVFGHWGVISKALLEELKNEVPKKSKKESDEAYEDRLNKVIKSQGSISIAFINDCINKQ |
| | LPEKQKTIQGYFAELGAVNNETIQKENLFAQIENAYTEVKDLLNTPYTGKNLAQDKVNVE |
| | KIKNLLDAIKALQHFIKPLLGDGTEPEKDEKFYGEFAALWEELDKITPLYNMVRNYMTRKP |
| | YSTEKIKLNFENSTLMDGWDLNKEQANTTVILRKDGLYYLAIMNKKHNRVFDVKAMPDD |
| | GDCYEKMEYKLLPGANKMLPKVFFSKSRIQEFAPSSQLLENYHNDTHKKGVTFNIKDCHA |
| | LIDFFKASINKHEDWCKFGFRFSPTETYEDLSGFYREVEQQGYKISFRNVSVDYIHSLVEEG |
| | KIFLFQIYNKDFSPYSKGTPNLHTLYWKMLFDEKNLADVVYKLNGQAEVFFRKSSINYEQP |
| | THPANKAIDNKNELNKKKQSLFTYDLIKDKRYTIDKFQFHVPITMNFKSTGNDNINQSVNE |
| | YIQQSDDLHIIGIDRGERHLLYLTVINLKGEIKEQYSLNEIVNTYKGNEYRTDYHDLLSKRE |
| | DERMKARQSWQTIENIKELKEGYLSQVVHKIAELMIKYNAIVVLEDLNAGFMRGRQKVES |
| | SVYQKFEKMLIDKLNYLADKKKQPEEPGGILNAYQLTNKFVSFQKMGKQCGFLFYTQAW |
| | NTSKIDPVTGFVNLFDTRYETREKAKTFFGKFDSIRYNDEKDWFEFAFDYTNFTSKADGSR |
| | TNWKLCTYGKRIETFRDEKQNSNWTSKEVVLTDKFKEFFKESNIDIHSNLKEAIMQQDSAD |
| | FFKKLLYLLKLTLQMRNSETGTNVDYMQSPVADEEGNFYNSDTCDSSLPKNADANGAYN |
| | IARKGLWIVQQIKTSDDLRNLKLAITNKEWLQFAQRKPYLDE |
| 167 | MGTLKQFTRVYPLSKTLRFELKPIGRTLEFINSSGLLEQDQHRADSYIKVKGIIDEYHKAFIE |
| | TVLNDFKLNYTDEGKKNSLEEFYTCYMCKAKDEAQKKLFEEIQGKLRKQIADCFSKDDKF |
| | KRIDKKELIKEDLVNFVTNQEDRLLIDEFRDFTTYFTGFHENRKNMYSAEAQSTAIAYRLIH |
| | ENLPKFIDNMLVFDKVAASPVSEHFVGLYSNFEEYLNVMNIAEMFRLDYFNIVLTQKQIDI |
| | YNYIIGGRTLDDGTKIKGLNEYINLYNQQQKDKSVRLPKLKPLYKQILSDRNAISWLPEQFE |
| | SDEKALEAIQKAYQELDEQVFNRNKEGEHSLKELLQTLAEYDLDKIYIRNDLQMTDISQKV |
| | FGHWGIISKALLEQLKKELPKKSKKETDEAYEERLNKVLKSQGSISIAQINNSVWVMGMEE |
| | QNSIQAYFARLGAVNTETVQQENIFSHIENAYTEVKDLLNTPYPLNKNLAQDKVNVEKIKN |
| | LLDAIKSLQHYVKPLLGDGTESEKDEKFYGEFVALWEDLDKITPLYNMVRNYMTRKPYST |
| | EKIKLNFENSTLMDGWDLNKEQANTTVILRKDGLYYLAIMNKKHNRVFDVKNMPESGDC |
| | YEKMEYKLLPGANKMLPKVFFSKSRINEFAPSEQLMANYRNETHKKGASFNIHDCHALID |
| | FFKSSINKHEDWSRFGFHFSDTNTYEDLSGFYREVEQQGYKISFRNVSVDYIHSLVEEGKIY |
| | LFQIYNKDFSPYSKGTPNLHTLYWNMMFDERNLADVVYKLNGQAEVFFRKSSITCERPTH |
| | PANQAIENKNALNEKKQSVFTYDLIKDRRYTVDKFQFHVPITMNFKSTGNDNINQSVNEYI |
| | QKCDDLHIIGIDRGERHLLYLTVIDMKGQIKEQYSLNEIVNTYKGNEYRTNYHELLSKRED |
| | ERMKARQSWQTIENIKELKEGYLSQVIHKISELMVKYNAIVVLEDLNMGFMRGRQKVEAS |
| | VYQKFEKMLIDKLNYLADKKKNPEEEGGILNAYQLTNKFTSFQKMGKQSGFLFYTQAWN |
| | TSKIDPVTGFVNLFDTRYETREKAKVFFCKFDSIRYNRDKDWFEFAFDYNKFTTKAEGTHT |
| | QWILCTYGKRMETFRDEKQNSQWTSQECGLTDKFKEFFAKYGIDIHTNLKEAIAQQDSAD |
| | FFKGLLYLLKLTLQMRNSKTGTDIDYMQSPVADANGNFYNSELCDNSLPKNADANGAYN |
| | IARKGLWIVRQIKASDDLRNLKLTISNKEWLQFAQNKPYLND |
| 168 | MSTYSDFTGLYTLSKTLRFELKPIGKTKDNIERNGILDRDSQRAIGYKAIKKVIDEYHKAFIE |
| | LMLDSFELKLKDEGRMDSLMEFYYLYHLPTIDSKRKDDLKKVQEALRKQISECFTKSEQY |
| | KRLFGKELIREDLADFIKTPKYEGVIRSQHDNEDLTEEEIRKIQEEVEKTIDQFYDFTTYFVG |
| | FYDNRKNMYVADDKATSIAHRMITKNLPKFIDNMDVFAKISSSEVATHFETLYKEMEAYL |
| | NVNSIEEMFQLDYFSMVLTQKQIDVYNSIIGGMVLENGTKIQGLNEYVNLYNQQQKDKGN |
| | RLPKLKPLFKQILSERNAISWLPEEFESDNDMLDGIERCYQDLKKQVFNGENSMQVLLKSI |
| | GDYDLEHIYLPNDLQLTDIAQKYYGSWSVIKKAMEEDVKANNPQKRNDTGEKYEERITKL |
| | LKSKESISIEEINRLMKWLLGDDYKPMENYFSMMGAEDDENGQKPDLFIRIENAYTEAKAL |
| | LTSVYPEDRKLSQDKKNVERIKNLLDAIKDLQRFVKPLLGGGTESEKDPRFYGEFVPMWE |
| | ALDQITPLYNMVRNRMTQKPYSEEKIKLNFDTPTLLKGWPDAQASSGAILKDNKGLYYLA |
| | ILDSMHRTCLNELKSCPTEKSEMAIMKYLQGGDMEKNVQNLMRINGVTRKVNGRKEKEG |
| | AMVGQNIRLENAKNTYLPTEINDIRLKQSYLTSSQSFNKQDLALYIEYYMPLVREYYSDYQ |
| | FSFRNPSEYKSFAEFTDHINQQAYQVQFGSISDKQLFQMVEEGKIYLFQIYNKDFSPYSKGT |
| | PNMHTLYWKMLFDERNLADVVYKLNGEAEVFFRKHSIEVGRPTHPANKPIENKNKLNEK |
| | KISVFAYDLLKDRRYTVDKFQFHVPITMNFKAAGLNNINPLVNAYLKESKATHIIGIDRGE |
| | RHLLYLSLIDLQGNIVEQYSLNEIVNEYNGNTYRTNYHDLLDAKEKQRDEARKSWQTIENI |
| | KELKEGYMSHVIHKIAELMVKYNAVVVLEDLKPGFMRGRQKVEKQVYQKFEKMLIDKL |
| | NYLVDKKLEATEMGGVLNAYQLTNKFESFQKPGKQSGFLFYIPAWNTSKMDPTTGFVNL |
| | LDTRYENMAKAKAFFGKFKSIRYNATKDWFEFAFDYNNFHNRAEGTRTQWALCTYGTRI |
| | ETKRDPKQNNSFVSEEFDLTSKFKKLLAHYAIDLNGNLLEQICSQNDTQFYKDLLHLLHLT |
| | LQMRNSITGTDVDYLVSPVMNVYGEFYDSRTCGNNLPKNADANGAYNIARKGLWIIEQIK |
| | QTEDLSKLKLAISNKEWMRYAQGLR |
| 169 | MKTLKNLTGLYSLSKTLRFELKPIGKTKENIEKNGILERDNERAIAYKAVKKVIDEYHKAFI |
| | ELMLDDFELNKDTLNEFYYLYHLPTSEAKRKTDLPKVQEVLRKQISERFTKSEQFKRLFGK |
| | ELIREDLVEFVKTPQYENIIRKMPGNEQLTDKEVKQIQERVQKDIAQFDDFTTYFSGFYDNR |
| | KNMYVPEDIATSIAHRMIGENLPKFIDNMDVFARIAASDVATHFDELNKAMELYLNVNEIP |
| | EMFQLDYFHMVLTQKQIDVYNAIIGGKVLDDGTKVQGLNEYVNLYNQQQKDKSKRLPKL |
| | KPLFKQILSERNAISWLPDEFDSDNEMLQSIGKCYHDLKEQVFGSLKTLLGSIKDYDLEHIY |
| | LPNDLQLTDIAQKHFGDWSVIKNAVIENLQSVNPKKKRENGENYDERILKLQKANDSYSIG |
| | FINALLRSKTDDFNPLENYFAGMGAEDNENGQKLNHFARIENAYTEVKTLLNADYPEGKS |
| | LSQDKANVEKIKNLLDSIKDLQHYVKPLLGSGMESDKDNRFYGEFTPLWEALDQITPLYN |
| | MVRNRMTQKPYSDEKIKLNFDNSTLLAGWDLNKEADNTCTLLRKDGNYYLAIINKRSNK |
| | VLKPENLISDGDCYEKMEYKLLPGANKMLPKVFFSKSRIDEFKPSESVLKNYQKETHKKG |
| | DNFNLDDCHALIDFFKESINKHEDWSKFGFHFSDTNSYEDLSGFYREVEQQGYKISFRNVS |
| | VNYINQLVDEGKIYLFQIYNKDFSPYSKGTPNMHTLYWRMLFDERNLADVVYKLNGEAE |
| | VFFRKHSIRVDKPTHPANKPIANKNAQNEKKESIFTYDLVKDRRYTVDKFQFHVPITMNFK |
| | AAGLNNINPLVNAYLKESNSTHIIGIDRGERHLLYLSLIDMKGNIVEQYTLNEIVNEYKGNT |
| | YRTNYHDLLDAKEKQRDEARRSWQTIENIKELKEGYMSQVIHKIAELMVKHNAIVVLEDL |
| | NMGFMRGRQKVEKQVYQKFEKMLIDKLNYLVDKKLDAEEMGGVLNAYQLTNKFEGFQ |
| | KLGKQSGFLFYIPAWNTSKMDPTTGFVNLFDTRYENMEKSKVFFGKFDSIRYNSAKGWFE |
| | FAFDYGNFTAKAEGTRTNWTLCTYGTRIETKRNPEKNNEFDSVEIDLTEQFKALFAKHQID |
| | LSGNLKEQICNQSDASFHKELLHLLHLTLQMRNSVTNSEVDFLLSPVMNASGEFYDSRTCG |
| | KNLPENADANGAYNIARKGLWIIEQIKNTNDNDLAKIKLAISNKEWLRYAQGLD |
| 170 | LKNKYYVCIFIKKTINSIINLKETNKMKKFSDFTNVYPVSKTLRFELKPIGKTQENLGKIIDE |
| | DNQRAKDYKVVKKVIDEYHKAVIEQLLNGFELDKDTLEKFKDLYHLSISEPKRKDLPKVQ |
| | EVLREQISKRFIKSEQYKRLFGKELIQEDLPEFVYSSKYGDVIRKQHEKEHLSDDDINRERK |
| | RICDEIAQFDDFTSYFGGFHENRKNMYVADDKATSIAHRLINENLPKFVDNMDVFAKIAAS |
| | DVAQHFDKLYKEMEPYLNVGAISEMFEIGYFSTVLTQKQIDVYNAIIGGKVEEDGRKIQGL |
| | NEYINLYNQQQKDKANRLPKLKPLFKQILSDRNAISWLPEEFESDNDMLQRIEECYQNLKE |
| | QVFDSLKTLLANIKEYDIAHIYLPNDLQLTDISQKHFGSWSVIKNAVIEKVKAENPQKKKES |
| | GEKYEERIAKELKHYDSLTIGFLNDLLKNQVGFTPIEMYFANMGAEDNENGQQVNHFVRI |
| | ENAYTDICQLLSTEYKGDSLAQDKKNVEKIKNLLDAIKNLQHFVKPLLGKGNESEKDNRF |
| | YGEFTPLWEMLDQITPLYNMVRNRMTKKPYSEEKIKLNFENSQLLKGWDLNKEVANTCT |
| | MLRKDGNYYLVIMNKKHNTVLQPGKLVSDGDCYEKMEYKLLPGANKMLPKVFFSKSRIG |
| | EFNPSERIINNYNNNTHKKGDTFNLDDCHALIDFFKTSINKHEDWSKFDFKFSDTNTYSDLS |
| | GFYREVEQQGYKIAFRNVSVQYIDQLVDEGKIYLFQIYNKDFSPYSKGTPNMHTLYWRAL |
| | FDEKNLANVVYKLNGEAEVFFRKHSLPYKPTHPANQPIANKNSQNKKKESTFAYDLIKDR |
| | RYTLDKFQLHVPITMNFKAAGINNINLMVKDYLKESDATHIIGIDRGERHLLYLSVINMKG |
| | EIVEQYSLNEIVNEYNGNTYRTNYHDLLDAKEKQRDEARRSWQTIENIKELKEGYMSQVV |
| | HKIAQLMVKYKAIVVLENLNMGFMRGRQKVEKQVYQKFEKMLIDKLNYLVDKQCAIDE |
| | EGGILHAYQLTNKFESFQKIGTQSGFLFYIPAWNTSKMDPTTGFVNLFDTRYENMEKARLF |
| | FAKFDSIRYNTNQNYIEFAFDYDNFTSKAEGTKTKWTLCTYGTRIETKRNPDKNNEFDSIEL |
| | NLTEQFKALFTTYHIDITGNLKEQICNQNDATFYKGLLHLLHLTLQMRNSVTGTATDYLLS |
| | PVMNNKGEFFDSRKCGKNLPENADANGAYNIARKGLWVIEQIKQAEDLSNIDLAIKNKEW |
| | MQFAQKNR |

TABLE S9B
Human Codon Optimized Nucleotide Sequences Group 9

| SEQ | Corre | |
|---|---|---|
| ID | sponding | |
| NO | AA | Sequence |
| 171 | 131 | ATGGATATGAAGTCACTGAACAGCTTTCAGAACCAATATTCACTTTCAAAAA |
| | | CGCTGAGATTTCAGCTTATTCCTCAGGGGAAAACACTGGATAATATCAACGA |
| | | GTCCCGAATCCTGGAGGAAGACCAACACCGCTCTGAGAGCTACAAACTCGTG |
| | | AAGAAAATAATTGATGACTACCACAAGGCTTACATTGAGCAAGCTCTGGGAA |
| | | GCTTCGAGTTAAAGATTGCGTCTGATAGTAAGAATGATAGTCTCGAGGAGTT |
| | | TTACTCTCAGTACATCGCGGAGAGAAAGGAAGATAAGGCAAAAAAGCTGTT |
| | | TGAGAAAACTCAGGATAACCTACGGAAGCAGATTTCCAAGAAGCTCAAACA |
| | | AGGAGAGGCATATAAGAGACTGTTCGGGAAAGAACTCATTCAGGAGGATCT |
| | | CTTGGAGTTCGTCGCCACCGACCCCGAAGCAGACTCTAAGAAACGGCTCATT |
| | | GAGGAGTTTAAAGACTTTACCACATACTTTATCGGCTTTCACGAGAATAGGA |
| | | AGAATATGTATGCCGAAGAGGCTCAGTCCACAGCCATCGCGTATCGAATCAT |
| | | CCACGAGAATCTGCCAAAGTTTATTGATAACATTCGCACCTTCGAGGAGCTG |
| | | GCCAAGAGCTCTATTGCTGACGTTTTACCCCAGGTGTATGAGGATTTTAAGG |
| | | CATATCTCAAAGTGGAGTCAGTTAAGGAGCTGTTTTCTCTAGACTATTTCAAT |
| | | ACCGTACTTACCCAGAAACAGCTTGATATATACAACGCAGTGATCGGTGGCA |
| | | AATCATTGGACGAAAACTCACGCATTCAGGGACTGAATGAGTATATCAACCT |
| | | GTATAACCAGCAGCATAAGGATAAGAAATTGCCTTTTCTGAAGCCACTGTTT |
| | | AAACAGATTCTGTCCGACAGGAATAGCTTAAGCTGGCTGCCAGAAGCATTCG |
| | | ACAATGATAAGCAGGTCCTTCAGGCAGTGCATGATTGCTACACATCCCTGCT |
| | | AGAAAGTGTTTTCCATAAAGACGGCCTGCAGCAGTTACTGCAGAGCCTGCCC |
| | | ACATATAATCTCAAAGGCATCTACTTACGGAACGATTTGAGCATGACAAATG |
| | | TCTCACAGAAGTTGCTTGGCGACTGGGGCGCTATAACTCGCGCCGTAAAAGA |
| | | AAAGCTGCAAAAGGAAAACCCCGCTAAAAAACGTGAATCAGATGAAGCGTA |
| | | TCAGGAACGGATCAACAAGATTTTTAAACAGGCCGGAAGTTATAGCTTGGAC |
| | | TACATCAACCAGGCACTGGAAGCCACAGATCAGACCAACATCAAGGTGGAA |
| | | GACTACTTTATTAATATGGGCGTCGACAATGAACAGAAGGAGCCGTTGTTCC |
| | | AACGGGTGGCCCAGGCCTATAATCAAGCTAGCGATCTCCTGGAAAAGGAAT |
| | | ATCCTGCAAACAAAAACCTTATGCAAGATAAGGAGTCGATCGAACATATCAA |
| | | GTTTCTCCTGGATAATCTCAAGGCCGTGCAGCATTTTATCAAACCTTTGTTGG |
| | | GTGATGGGAACGAAGCTGACAAGGATAACCGGTTCTACGGAGAGCTAACGG |
| | | CCCTGTGGAACGAGTTGGACCAGGTAACCAGACTCTATAACAAAGTGAGAA |
| | | ACTACATGACTAGAAAACCCTATAGCGTCGACAAGATCAAGATCAATTTCAA |
| | | GAACTCTACCCTTCTAAATGGTTGGGATAGGAATAAAGAACGAGACAACACT |
| | | GCCGTCATCCTGCGGAAAGATGGGAAATTTTACCTAGCAATCATGCATAAGG |
| | | AGCACAATAAGGTATTCGAAAAATTCCCCGTCGGCACAAAGGACAGCGATTT |
| | | CGAAAAGATGGAATACAAACTGCTGCCTGGTGCCAACAAGATGCTGCCCAA |
| | | GGTGTTTTTCTCTAAATCTCGCATCGACGAATTCAAGCCTTCCGCCGAACTGC |
| | | TGCAGAAATACCAGATGGGCACACACAAGAAGGGGGAATTATTTTCGCTAA |
| | | ACGATTGCCATTCCCTGATCGACTTCTTCAAGGCTTCCATCGAGAAACACGAT |
| | | GATTGGAAGCAGTTCAATTTTCACTTCAGTCCAACTTCCAGCTACGAAGACCT |
| | | CAGCGGCTTCTATAGAGAGGTGGAGCAACAGGGATACAAACTTACTTTTAAG |
| | | AGCGTGGACGCGGACTACATTAATAAGATGGTTGACGAGGGAAAGATATTC |
| | | CTTTTCCAGATCTACAACAAAGATTTCAGCGAACACTCCAAAGGGACTCCCA |
| | | ATCTGCACACCCTTTATTGGAAGATGCTGTTTGACGAAAGGAATTTGCAGAA |
| | | CGTGGTCTATAAGCTTAATGGCGAAGCTGAGGTCTTTTTCCGGAAAAAAAGT |
| | | TTAACCTACACCCGGCCCACCCATCCTAAGAAGGAGCCAATTAAGAACAAGA |
| | | ATGTGCAGAATGCCAAAAAGGAGAGCATCTTCGACTACGATCTGATCAAGA |
| | | ACAAAAGGTTTACGGTTGACAGTTTTCAGTTTCACGTACCAATTACAATGAA |
| | | CTTCAAGAGTGAGGGACGTTCTAACCTCAACGAGAGGGTGAACGAGTTCCTG |
| | | CGACAAAATAACGATGCCCACATAATTGGGATTGATAGAGGGGAGCGCCAC |
| | | TTGCTGTACCTTGTCGTTATCGACAGGCATGGTAATATCGTGGAGCAGTTCTC |
| | | CCTCAACTCCATAATTAACGAGTACCAAGGGAATACCTATGCCACTAATTAT |
| | | CACGATTTACTGGACAAGCGTGAAAAGGAAAGGGAGGAGGCCAGGGAGTCC |
| | | TGGCAGAGTATTGAGAACATCAAAGAGCTGAAAGAGGGATACCTCTCTCAA |
| | | GTGGTTCATAAAATCGCTGACTTAATGGTGAAATACCATGCTATTGTCGTGCT |
| | | GGAAGATCTGAACATGGGCTTCATGCGGGGGCGCCAGAAAGTTGAAAAACA |
| | | AGTGTACCAGAAATTCGAGAAAATGCTGATTGACAAGCTAAACTATTTGGTA |
| | | GACAAAAAGCAGGATGCTGAGACGGACGGCGGACTGCTAAAAGCATATCAG |
| | | CTGACAAACCAGTTTGAATCATTTCAGAAGCTCGGTAAGCAGTCGGGCTTCC |
| | | TGTTCTACGTGCCAGCCTGGAACACGTCTAAAATCGATCCGTGTACCGGATT |
| | | CACGAACCTCCTGGACACTCGATACGAGTCAATCGAAAAGGCGAAAAAGTTT |
| | | TTTCAGACCTTCAATGCCATTAGATATAATGCAGCCCAAGGGTACTTCGAGTT |
| | | TGAACTCGACTACAATAAGTTCAATAAGAGGGCTGACGGGACACAGACCCTC |
| | | TGGACTCTGTGTACCTATGGGCCACGCATAGAGACACTCAGGTCCACCGAGG |
| | | ACAATAACAAATGGACTTCTAAAGAGGTGGACCTCACCGACGAGCTGAAGA |
| | | AGCATTTTTACCACTATGGCATTAAGCTGGATGCAGACCTCAAAGAAGCTAT |
| | | AGGTCAGCAGACTGACAAGCCTTTTTTCACTAACTTACTCCACCTTTTGAAGC |
| | | TGACACTCCAGATGCGCAATTCCAAAATAGGCACCGAAGTCGACTACCTTAT |
| | | ATCACCGATCCGAAACGAGGATGGTACTTTCTATGACAGTAGACAAGGAAAT |
| | | AAGTCGCTGCCTGCCAATGCCGATGCGAATGGAGCCTACAACATAGCTCGTA |
| | | AGGGCTTGTGGGTTATCAATCAAATAAAACAGACACCCCAAGATCAAAAAC |
| | | CGAAGTTGGCCATTACCAATAAGGAGTGGCTTCAGTTCGCACAAGAAAAACC |
| | | ATACCTTAAGGACTGA |
| 172 | 132 | ATGGATCACTTCACCAATCTGTACCCTGTGTCGAAGACCCTGAGATTCGAGC |
| | | TGATTCCAGACAAGCGCACCAAGGCAATCCTGGAGCGCACCGACCTGATCGC |
| | | CCAGGATGAGCATCGAGCTGAGTCTTATAAACTCGTGAAGAAGATCATCGAT |
| | | CGGTATCATAAAAAGTTCATCGACAGTGTGCTGGGAACTCTGAAACTGCCTC |
| | | TGGACGAACTGGACTCACTGCACGAGCTGTACAGCAAATCTCAGAAGTCAGA |
| | | CGCCGACAAAAAGGCCCTCGAGAAGATCCAGGACAAGCTGCGGAAACTGAT |
| | | CGCAGACGCCCTGACTAAGGATTCTAGGTACAAGAGGATCGACAAGAAAGA |
| | | GCTCATCAGAGAGGACATCCTGTCTGTGATCGAGCCCGAGGAGCAAGCCCTG |
| | | ATCGACGAGTTCCGGGACTTCACCACATACTTTACAGGCTTTCACGAGAACA |
| | | GGAGGAACATGTACTCCGCTGAGGCCCAGAGCACCGCTATCGCCTATAGACT |
| | | GATCCACGAGAACCTGCCTAAGTTTATCGACAACATGGCCACTTTTGAGAAG |
| | | ATCGCAGCCTCTCCCGTGGCCGAGCACTTCCCACAGCTGTACCAGGAGATGG |
| | | CAGAATATCTGAACGTGCGGGAGATCGGTGACCTCTTCAAGCTGGATTACTA |
| | | CACAGAGCTGCTGACGCAGAGTCAGATCGAGGCTTATAACGCAGTCATCGGC |
| | | GGAAGGACTGTGGAGGAGTCTGGAAAGAAGATCCAGGGGATCAACGAGTAC |
| | | GTGAACCTGTACAATCAGCAGCAGCCCTCTAGAGACACTCGGCTGCCCAAGC |
| | | TGAAGCCCCTGTTTAAGCAGATTCTGTCTGATAGGGAGGCTGTGTCTTGGCTG |
| | | CCTGAGGAGTTTGAGAGCGATAAAGACATGCTGACCGCCGTGAAGGAGTGC |
| | | TACCACAGCCTGAACGATCACGTGTTTGATCCTCTGCGCGAGCTGCTGACAA |
| | | ACCTGTCTAGTTACAATCTGGACGGCATCTACATCCCCAACGATCTGAGCCT |
| | | GACAGACATTAGTCAGGCCATGTTCAAGGATTGGTCTGTGATCAAAAAGGCC |
| | | ATCGCCGAAGACGTGAAAAGGAACTGCCCACTGAAAAGGAACGAAAAGGCC |
| | | GACAATTATGAGGAGAGGATTAGTAAGCTGATCAAGAGAGAAAACAGCTTC |
| | | TCCATTGGGTACATGAATCACTGCATCCAGGAGAAGGATATCTGCGATCATT |
| | | TCGCTACCCTGGGCGCTAGCGACAACGGGGAGGAGCAAACCGTGAACCTGTT |
| | | TCTGCAGATCCAGAATGCCTACACCGACGCTCAGAGCCTGATCGAAAATGAC |
| | | TATCCCGAGGATCGGAACCTGGCCCAGGACAAAGAGAACGTCGCCAGACTG |
| | | AAGGCCCTGCTGGATGCTGTGAAGGCCCTGCAGCGGTTTGTGAAACCTCTGA |
| | | GGGGCAACGGAGACGAGCCTGACAAGGACGAGCGATTCTATGGCGAGCTGG |
| | | CCGTGCTGTGGGAGGAGCTCGACCACATCACACCTCTGTACAACAAGGTGCG |
| | | GAACCGCATGACAAGAAAGCCCTACAGCATCGAAAAGTTTAAACTGAACTTC |
| | | CAGAATTCCACACTGCTGGACGGCTGGGATCTGAATAAAGAGCGCGATAAC |
| | | ACCGGAGTGATTATGAGAAAGGACGGCAAGTACTTCCTGGCCATCATGAACA |
| | | AACAGTTCAATAGAATTTTCGTTGACGCCCCCCAGGCCGGACACGACGAGGA |
| | | TACCTTCGAGAAGATGGAGTATAAGCTGCTGCCCGGAGCTAACAAAATGCTG |
| | | CCCAAAGTGTTCTTCAGCAAGTCCCGGATCGAAGAATTCAAGCCTAGCCCAG |
| | | AGCTGCTGGAGCACTATGAGAAGGGCACCCACAAAAAAGGAGATAACTTTA |
| | | GTCTGAAAGACTGTCATGAGCTGATTGATTTCTTTAAGGCCAGCATCGCCAA |
| | | GCATGAGGACTGGTCTAAGTTCGACTTCCATTTTTCCCCAACTGATACATATG |
| | | AGGATCTGTCCGGCTTCTACAGGGAGGTGGAACAGATGGGCTATAAGATCAG |
| | | CTACAAGCAGATTCCCGTGTCATACATCGACAAGATGGTGGAGGAAGGAAA |
| | | GCTGTTTCTGTTCCAGATTTACAACAAGGATTTCAGCCCATATAGCAAGGGA |
| | | ACCCCCAATCTGCACACGCTCTACTGGAAGATGGTGTTTGACGAACGGAACC |
| | | TGGCCAATGTGGTCTACAAACTGAACGGCCAGGCCGAGGTGTTCTATAGGAA |
| | | GAAATCTCTGGACTATGACAGACCTACCCATCCCGCTAACCAGGCAATTAAG |
| | | AACAAGAACCCCGAGACAACAAAGAAAGAGTCCACCTTTGATTACGACATC |
| | | ATCAAAGACAAGAGATTCACCATGGATAAATTCCAGTTCCACGTCCCCATTA |
| | | CCATCAACTTCAAGGCCACCGGGTCTGGCTCTATCAATCCTCTGGTTAATCAG |
| | | TACATCCACGACCACGACGACCTGCATTTCATCGGCATCGATCGGGGCGAGA |
| | | GACACCTGCTCTACGTGACCGTGATTGACAGCAAGGGATGCATCAAGGAGCA |
| | | GTTCAGCCTGAACGAGATCGTGAACGAGTACCAGGGCAACACCTATAAGAC |
| | | CAACTACCGCAGCCTGCTGGATAAACGGGACGACGAGCGCCAGCGGGAGCG |
| | | GCAGAGCTGGAATACCATCGAGGGTATTAAGGAACTGAAGCAGGGATACCT |
| | | GTCTCAGGTGATTCACAAGATCGTGAGCCTGATGGTGAAATACCACGCTGTG |
| | | GTCGTGCTGGAAGACCTGAACATGGGCTTCAAACGCGGCCGCCAGAAAGTC |
| | | GAGTCCTCCGTGTACCAGCAGTTTGAGAAGGCCCTGATTGATAAGCTCAACC |
| | | TGCTGATCGACAAGAAAATCGACGCCGATCAGCCCGGTGGCCTGCTGCACGG |
| | | CTACCAGCTGACCAACAAGTTCACCTCCTTTAGAGACATGGGCAGACAGAAC |
| | | GGCTTCCTGTTCTATATTCCCGCATGGAACACCAGCAAAATCGATCCAGTGA |
| | | CCGGCTTCGTGGACCTGCTGCATCCTAGATACGAGAGCGTGGACAAATCCCG |
| | | CTCCTTCTTCTGCAAGTTTAAGAGCATCAGGTACAACCAGGACAAGGGATGG |
| | | TATGAGTTCACCATGGACTATAATGACTTCACAACTAAGGCTGAAGGAACAA |
| | | GGACAGAGTGGACTCTCTGCACACACGGCACCCGGGTGGAGACATTCAGGA |
| | | ACGCCGAGAAAAATTCCTCCTGGGATTCCAGAGAGGTTAATCTCACTGACGA |
| | | GTTCAATGCCCTGTTTGCGACCTACGGCGTCGAGCCCCAGGGCAATCTGAAG |
| | | CAGGCTATCGCCGAGAGATCCCAGAAGGAATTCTTCGATAAACTGACCCACC |
| | | TGCTGGCCCTGACACTGCAGATGCGGAATAACATCACCGGCACCGAAGTGGA |
| | | CTACATGATCTCCCCTGTGGCTGACGAGAATGGGAAATTCTTCGATAGTCGG |
| | | ACCTGCGGGAAGGAACTGCCAGAAAACGCTGACGCCAACGGGGCCTATAAC |
| | | ATCGCCCGAAAAGGACTGTGGGTCGCCCGGCAGATTCAGGCCGCCCACGTGG |
| | | ATGAGAAGGTGAACATGGCCATCTCCAACAAGGAATGGCTGTCCTTCGCTCA |
| | | GTCCAAGCCCTATCTGAATGACTGA |
| 173 | 133 | ATGAAACAGTTAAATGATCTTACTGGTCTGTACTCACTCAGTAAGACCCTTCG |
| | | GTTCGAACTGAAACCTATTGGAAAGACCCTCGAGCATATTGAATCGAAAGGA |
| | | TTCATTACACAGGACGAGAAGAGGGCCGAAGAATACAAGAGAGTAAAAGAT |
| | | ATCATCGATCGGTACCACAAAAGCTTCATTACAATGTGTCTCTGTGGTTTTAA |
| | | ATTCAATCAGGAAGACCTCGACACATACGCCGCTCTGGCGGAAGACTTCAAT |
| | | AGAGATGAAAAAGCCTTTGAGGAGTCTAAAAAGACTTTACGGAAGCAGATC |
| | | GTGGGAGCCTTTAAGAAAGGCGGCGGCTATAGCGACCTTTTCAAGAAAGAA |
| | | CTGATCCAGAAGCACCTGCCAGAGATCGTGACAGATGACGAGGAAAAGAAA |
| | | ATGGTCGAAAACTTCTCCAAGTTCACAACATATTTCACCGGTTTCAACGAGA |
| | | ATAGAAAGAATATGTACTCCGACGAGGAAAAGAGCACCGCGATTGCTTACA |
| | | GGCTGATACATGACAACCTGCCTATGTTTCTTGACAATACGCGTAGTTTCTCC |
| | | CGGATCGCTGATAGCGACGTTAGGCAGTCTTTCTGCAAAATAGAGTCATCTT |
| | | TTAGCGAATACCTGAATGTGGAGCATCTCGCAGAGATGTTTCAGCTGGATTA |
| | | CTTCAGTGAGACATTGACGCAGGAACAGATCGCAGTGTATAACCACGTGGTT |
| | | GGTGGCCGCACATTGGAGGACGGAACCAAAATTCAGGGAATTAACGAGTAT |
| | | GTCAACCTATATAACCAGCAGCATAAGGATAATCGATTACCACTCCTCAAAC |
| | | CGTTGTATAAAATGATTCTCTCAGATCGAGTGGCACTGTCTTGGCTGCCCGAC |
| | | GAATTTGCAAATGACAAGGAGATGATCGACGCCATCAAAGAGACATACGAT |
| | | TCACTGAAGGAAAATCTCACTGGTGACGGCGATGGTAGTCTTAGAAATCTGC |
| | | TGCTCAACATCAACAATTACGATATCGAGCACATCTATATTGCGAACGACCT |
| | | TGGACTAACCGACATCAGTCAGCAGATGTTTGGGCAATATGACGTGTACACA |
| | | TCCGCTATCAAACAGGAACTTAGAAATTCCGTCACTCCTACGGCTAAGGAAA |
| | | GACGCGAACCAGAACTCTATGCTGAGAGAATTAACAAGCTCTTTAAGTCCAC |
| | | TAAATCATTCTCTGTAGCTTACCTGAACTCTTTGGTGGATGCCGAGCACACCA |
| | | TCCAGAACTACTATCAACAGCTTGGAGCCTATGATCGCGACGGCGAACAGCG |
| | | CATCAATCTCTTTACTCAACTGGAAATGGCTTACGTTGCAGCTAAAGATATTC |
| | | TGTCCGGGAAGCATGGTAACATCTCTCAAACCGATGCCGAGATTGCCATTAT |
| | | TAAGAACTTGCTGGATGCCTACAAGTCCCTGCAGCATTTTATAAAACCCCTG |
| | | CTGGGGAATGGGGATGAGGCGGACAAAGACAACGAGTTCGACGCAAAACTG |
| | | AGAGAGGTGTGGGACGCTTTGGACATAGTCACCCCCCTATATAATAAGGTTC |
| | | GAAATTGGCTTACTCGGAAGCCATATTCCACGGAGAAAATTAAGCTCAATTT |
| | | TGAGAATGCCCAGCTGCTGAATGGGTGGGACAAGAACAAAGAGACGGACTG |
| | | CACAAGCGTGCTGCTCAGGAAGGACGGGAAATACTTCTTAGCAATCATGGAT |
| | | AAGAAGGCTAACCGTGCATTCGATGTCGAAGACCTTCCCTGCGATGGCATTT |
| | | GCTTCGAGAAAATGAACTACAAACAAATCGCGCTCCCCATGGGCTTAGGGGC |
| | | GTTTGTCAGGAAGTGCACCGGCTCGGCAAAAAAACTGGGTTGGACCTGTCCC |
| | | TCCAGTCTGCTGAACAAGGACATGAAGATCATCATCAAAGATGATGAGGCTA |
| | | CTAATGTCCTCCCTTCTTTAATTGAGTGCTACAAGGACTTCTTAAATATCTAT |
| | | GAGAAGGACGGCTTCAAGTATAAGGACTTCAACTTTAAGTTCAAGCCAACCC |
| | | ACGAGTATAAGAAGCTGTCACACTTTTTTGCAGAGGTTCCTACTCAGGGCTA |
| | | TAAAATTACTTTTCGGAAAGTAAGCGAGTCATTCATCAACCAACTGGTTGAT |
| | | GAAGGGAAGCTGTATCTGTTCCAGATATGGAACAAAGACTTCTCGGAATTCA |
| | | GTAAAGGGTCACCTAATATGCACACACTCTACTGGAAAATGCTATTTGACGA |
| | | GCGCAATCTGGCTGACGTGGTATATAAGCTGAACGGCCAGGCCGAAGTCTTT |
| | | TACCGGAAGTCAAGTTTAGACGTGGCTAACACCACCATTCACAAGGCCCATC |
| | | AGCCCATCCTTAACAAAAACCAGGAAAACAAAAAGCAACAGTCCACTTTCG |
| | | ACTACGACATAATTAAGAATCGGCGTTACACCGTGGATAAATTTCAGTTCCA |
| | | TGTGCCAATATCCATCAACTTCAAAGCAACTGGCAGGGATAATGTTAACTCT |
| | | CAGGTCCTGGATATCATCCGGAATGGCGGAATTAAGCACATTATTGGTATTG |
| | | ATCGAGGGGAGCGGCACCTATTATACCTAAGTTTGATAGACTTGAAGGGGAA |
| | | CATCGTGAAGCAGATGACACTGAATGATATAGTGAATGAGTACAACGGAAA |
| | | CACCTACGCAACAAATTACAGAGACTTGCTGGCAGAGCGCGAGGGCAATAG |
| | | AACTGAGGCCCGCAAGAACTGGAAGAAAATCGAAAACATCAAGGACATCAA |
| | | ACAAGGCTATCTTTCTCAAGTTGTGCACATAATTAGCAAGATGATGGTCGAA |
| | | TACGACGCCATCGTGGTCCTGGAAGATCTCAACATGGGCTTCATGCGGGGAA |
| | | GGCAAAAGATTGAAAGATCCGTCTATGAGCAATTCGAGAAGATGCTGATTGA |
| | | CAAGCTCAATTATTACGTAGATAAGCAAAAGGACGTTAACGAAGCCGGCGG |
| | | CTTGCTCCATGCCCTTCAGCTAACCTCCCGCTTCGAGAGCTTTAAAAAACTCG |
| | | GAAAGCAGAGTGGGTGTTTGTTTTACATCCCAGCCTGGAATACCAGCAAGAT |
| | | AGACCCCGTAACCGGATTTGTGAACCTGTTTGATACGAGGTACACCAATGCC |
| | | GATCAGGCCAGAAAGTTCTTTAGCCTGTTTGATAGCATAAGGTATAACGCCG |
| | | AGAAAAACTGGTTTGAGTTCGCCTTTGACTACGATAAATTCACAACAAAGGC |
| | | CAAAGGGACTCGCACACGGTGGACTCTGTGCACATATGGAACTCGTATAAGG |
| | | ACGTTCAGGAACCCAGCCAAGCTTAATCAGTGGGACAATAAAGAAGTGGTG |
| | | TTAACCGATGAGTTTAAGAAGGCGTTTGCCGATGCCGGTATTGATATCCACG |
| | | GGAACTTGAAGGAAGCTATATGTTCACTGGAGGATAAAAAATACCTTGAACC |
| | | GTTGATGCATCTGATGAAACTGCTCCTGCAGATGCGCAACTCTATCACCAAC |
| | | ACCGAGGTGGACTATCTCCTGAGCCCTGTCGCTGATAAAAACGGCAGCTTCT |
| | | ATGATTCTAGGGTGTGTAGCTATGCCTTGCCTAAGGATGCAGACGCAAACGG |
| | | GGCTTACAATATCGCTCGTAAGGGACTATGGGCTATTCGCCAAATCCAGGAA |
| | | ACCCCTGTGGGAGAGCGACCGAATCTGGCAATCAAGAATAATGAGTGGTTG |
| | | AAATTTGCCCAACAGAAGCCCTACCGAGACGAATGA |
| 174 | 134 | CTGCTGAACTACAAATACTACATCGTGATGAAGACATACGATGAGCTGACGG |
| | | GCCTGTATTCCCTGAGCAAAACGCTGAGATTTGAGCTGAAGCCTGTGGGTAA |
| | | GACCCTGGAGTACATCGAGAACAAGGGCATCATCGCTCAGGACGAGAAGCG |
| | | CGCCGAGGAATACAAGCTGGTGAAAGGCATTATCGACAGATACCACAAATC |
| | | CTTCATCAGACTGTGTCTGTACAACTTTAAGCTGAAGCTGGAATCTGACAAC |
| | | GGACTGGATAGCCTGGAAGAGTACGTGGAATACGCCTCAATCCAACGGAGG |
| | | ACCGACACCCAGGACGCTGAGTTCAAGAAGGTGAAAGAGAACCTGAGGAAG |
| | | CAGATCGTGAGCGCATTTAAAAACGGGGCCACCTATGGCGATCTGTTTAAGA |
| | | AGGAGCTGATCCAGCAGATCCTGCCTGATTTCGCCGACAATGATGAGGAGAG |
| | | ACAGCTGGTGGACAACTTTAGCAAGTTCACAACCTACTTCACCGGGTTTCAT |
| | | GAGAACAGGAAAAATATGTACTCCGAGGACGATAAAGCTACCGCCATCGCA |
| | | TTCCGGCTGATCCACGAGAATCTGCCCCTGTTCATTGACAACATGAAGAGTTT |
| | | TGCCAAGATCGCCGAGACCGTGGTGGCCGAGCACTTCGCCGATATCGAGACG |
| | | GCTTTTGAGGATTGTCTGAACGCCCTGATCCCCGATATGTTCGCTCTGCCATA |
| | | CTTCACCAAAACACTGACCCAGGAGCAGATTGAAGTGTACAATAATATCATC |
| | | GGAGGCAGGGTGCTGGAGGACGGCACCAAAATCCAGGGCATCAATGAGTAC |
| | | GTTAACCTCTACAACCAGCAACAGAAGGACAAGTCTGCGCGCCTGCCCCTGC |
| | | TGAAACCACTGTATAAGATGATCCTGAGCGATCACGTGGCCATTTCCTGGCT |
| | | GCCCGAGGAGTTCGCCAGCGATGAGGAGATGCTGTCTGCCATCAACGGGGCC |
| | | TACGACATGCTGAAGGACGTGCTGTCTGAAAAGAACGAGGACTCTCTGTTCA |
| | | ACCTGCTGAAGAACATCAACGAGTACGACACCGAGCACATCTTTATCGCTAA |
| | | CGACCTGGGCCTGACCGACATTTCCCAGCAGATCTTCGGCCAGTACGACGTG |
| | | TATAGCAGTGTGATTAAAGCTGAGCTGAGGAATCAGGCCAGTATGACCGCCA |
| | | AGGAGAAGAAGAATCCCGAGCTCTATGAGGACAGAATCGCCAAACTGTACA |
| | | AATCAGCCAAATCATTTAGCATCGATTACCTGAATAGTTTTGTAGACAGCGA |
| | | AAAGTCAATTCAGAATTATTATGCCCAGCTGGGGGCATACGACCGGGATGGC |
| | | GAGCAGAGGATCAACCTGTTTGCCCAGATCGAAATGAAGCACATCGCCGTGG |
| | | CCGACATCCTGGCCGGAAAGGTGGCCAATCTGAACCAGAGCGAACAGGGCA |
| | | TCAAACTGATTAAGGACTTCCTCGACGCATTTAAAGCCCTGCAGCATTTCATC |
| | | AAGCCTCTGCTGGGAAACGGCGACGAAACTGATAAGGACAACGCCTTCGAC |
| | | GCCAGACTGAGGGTGGCATGGGACACTCTGGACATCATTACTCCCCTGTACA |
| | | ACAAGGTGCGCAACTGGCTGACAAGAAAGCCCTACTCCGAGGAGAAGATCA |
| | | AGCTGAACTTCGAAAACGCCCAGCTGATGAATGGCTGGGACCTGAACAAGG |
| | | AGCCCGATTGCACCTCTATCATACTGAGAAAGGACGACAAGTTTTACCTGGC |
| | | AATTATGGACAAAAAGGCCAACCATTCCTTCGATACCGACGAGCTGCCCAAC |
| | | GAGGGAGATTGTTATGAGAAGGTGGACTACAAGCTGCTGCCTGGCGCCAATA |
| | | AGATGTTGCCCAAGGTGTTTTTTAGCAAGAGCCGCATCGACGAATTTGCCCC |
| | | AAGCCAGTCCCTGCTGGATGCTTATGAGAAGGGCAGCCACAAGAAGGGCAC |
| | | CAATTTCTCCCTGAACGACTGCCATAATCTGATCGACTTCTTCAAACAGTCAA |
| | | TCGCCAAACATGAGGACTGGAAGAAGTTCCCCTTTGATTTTAGTGACACAAG |
| | | CAGCTACGAAGACATTAGCGGCTTCTATCGCGAGGTGGAACAGCAGGGGTA |
| | | CATGCTGTCTTACAGAAATGTGTCTGCCGCCTACATTGATAAGCTGGTCGAC |
| | | GAGGGCAAGTTGTTCCTGTTCCAGATCTGGAACAAAGATTTTTCCGAATATTC |
| | | CAAAGGCACTCCTAACATGCACACCCTGTACTGGAAGATGCTGTTCGATGAG |
| | | AAGAATCTGGCCAACGTGGTGTACAAACTGAACGGACAGGCAGAGGTGTTC |
| | | TACCGCAAGAAGTCCCTGGACATTGCAAATACCACAGTGCATACCGCTAACC |
| | | GGCCTATTGCCAACAAGAACAAGGATAACAAGAAAAAAGAGAGCACATTCG |
| | | AGTACGACATCATTAAAAACCGGCGGTACACCGTGGACAAGTTCCAGTTCCA |
| | | CGTGCCCATAACCATGAACTTCAAGAGCATTGGGAACGACAATATCAATGAG |
| | | AGCGTGCTGAATGTGATTCGGAATAACGGGATTAAGCACATCATCGGAATCG |
| | | ACAGAGGCGAGAGGCATCTGCTGTACCTGTCATTGATCGATCTGAAAGGCAA |
| | | TATCGTGAAGCAGATGACCCTGAACGACATCGTGAACGAATATAATGGCAAC |
| | | ACCTACAGCACCAACTATAAGGACCTGCTGGCCACCAGGGAGGGAGATAGG |
| | | ACCGACGCCAGACGCAACTGGCAGAAAATTGAGAACATCAAGGACCTGAAG |
| | | GAGGGATACCTGTCTCAGGTGGTGCACGTGATAGCAAAGATGATGGTGGAGT |
| | | ACAAAGCCATCGTGGTGCTGGAAGATCTGAACATGGGCTTTATGCAGGGCAG |
| | | GCAGAAAATCGAGAGAAACGTGTACGAGCAGTTTGAGCGGAAACTGATCGA |
| | | GAAGCTTAACTTTTACGTGGACAAACAGAAGAAGGCCGACGAGGTGGGGGG |
| | | ACTGCTGAATGCTTACCAGCTGACCTCTAAGTTCGATAGTTTCAAAAAACTC |
| | | GGCAAGCAGTCTGGCTGCCTGTTCTACATCCCAGCTTGGAACACCAGCAAGA |
| | | TCGACCCTGTGACCGGCTTCGTGAACATGCTGGACACAAGATACGAGAATAC |
| | | CGAAAAAGCCAGGTGTTTTTTCTCTAAGTTTGACAGCATCAGGTACAACACC |
| | | CAGAAGGACTGGTTCGAGTTCGCCTTTGACTATGGGAACTTCACCACCAAAG |
| | | CCGATGGCACCCAGACCAAATGGACCCTGTGCTCCTTCGGCACTAGGGTGAA |
| | | GACCTTCAGAAACCCCGAGAAGGTGAATCAGTGGGACAATGTGGAGGTGGT |
| | | CCTGACTGAGGAGTTTAAGAGCCTCTTCGCTGACGCCGGCATCAACATCAAC |
| | | GGCAATCTGAAGGAGCAGATATGCAATCTGTCCGACAAGAAGTATCTCGAGC |
| | | CACTGATGGGCCTGATGAAGCTGCTGCTGCAGCTGAGGAATAGTATCACCAA |
| | | TAGCGAGGTGGACTACCTGCTGAGCCCAGTATGCGACAATAAAGGGAACTTC |
| | | TACGACTCAAGAACCTGCAGTAATAAGCTGCCTAAGGACGCCGATGCAAAC |
| | | GGGGCCTACAACATTGCAAGAAAAGGCCTGTGGGCCCTGGCTCGCATCGTGG |
| | | ATAGCGCTGAAGGGGAGCGGCCTAACCTGGCCATCTCCAATAAGGACTGGCT |
| | | GTGTTTCGCACAGCAGAAACCTTATCTGAACGATTGA |
| 175 | 135 | ATGGAGAGATTTGACGAACTGACCGGCCTGTACAGCCTGTCCAAAACCCTCC |
| | | AGTTCGAGCTGAAGCCTATCGGGAAGACTCTGGAGCAGATCGAGAGAAAGG |
| | | GCATCATCGCCCAGGATGAGAAAAGGGCTGAAGAGTACGAGATCGCCAAGT |
| | | GTATTATTGACGAGTACCACAAGGCCTTTATCAGCATGTGTCTGAAGGGACT |
| | | GAGGCTGAATCTGTCCAGCACAGGCTCTCTGGACAGCCTGGAGGAGTACGTG |
| | | GAGCAAGCCAGCAAGCTGAGAAGAAGTGAATCCGAGGAGAAAAATTTCGAC |
| | | ACCATCAAGCAGAACCTGAGACGGCAGATCGTGAACTCCTTTAAGAGCCGCG |
| | | GCGGCTCTTTCACTGACCTGTTCAAGAAGGAGCTGATTACCCAGCACCTGCC |
| | | CGAGTTTGTGAGTGAGAAGAACAAAAAGCAGATTGTGGAGAACTTTTCCAA |
| | | GTTCACTACTTACTTCACTGGCTTCCACGAGAACCGGAAGAATCTGTACTCCG |
| | | AGGAAGAGAAATCCACAGCCATCGCTTACCGACTGATTCACGAAAATCTGCC |
| | | CATGTTTATCGACAACATCAAGACCTTCGCCAAAATCGCCGACTCCGATGTG |
| | | GCCAATTACTTTGTGGAGATCGAGACCACCTTTTCCGAGTACCTGGACGGCT |
| | | CCCATATCACTGATATGTTTAAACTGGAGTACTTTACCGAAACCCTGACCCA |
| | | GGAGCAGATCAGTCTGTACAACAACGTGATCGGGGGCGTGAGCAATGAGGA |
| | | TGGAACCAAGAAGAAGGGGCTGAACGAGTACGTCAATCTGTACAATCAGCA |
| | | GAATAAGACCCGGCTGCCTCTCCTGAAGCCACTCTACAAGATGCTGCTGTCC |
| | | GACAAGGTGTCCCTGAGCTGGCTGCCTGATGACTTCGTGTCTGACGAAGAGA |
| | | TGATTTATGCTATTAACGAAATGCAGCTCAGCCTGAAGGACCTGCTGTACTCT |
| | | GACGGTGAAAACAGCCTGAAGTATCTGCTGACTCACATCGGCGATTACGACA |
| | | CCGAGCATATTTACATCTCCAACGACCTGGGCCTGACCGACATCAGCCAGCA |
| | | GATCTTCGGCCAGTATGATGTGTATACCAGCGGCATCAAAACCGAGCTCTGC |
| | | AATCAAATCAAGCAGAGCGCCAAGGAAAAGCGCGAGCCCGAACTGTACAAA |
| | | GAAAGGATCAACAAGCTGTTCAAAAGCGCCAAATCCTTTAGCATAAACTACC |
| | | TCAATTCCTTCGCCGAGGGCGATAAGACCATTCAGGCCTACTATGCCAGACT |
| | | GGGAGCACATGATCTGGAGGGAGAGCAGAGTACCAACCTGTTCACCCAGAT |
| | | TGAAATGGCCAGCATCGCCGCCTCTGACATCCTGGCCGGGAAGCACACCAAT |
| | | ATTAACCAAAGCGAGGAGGATACCAAGCTGATCAAGGACCTGCTGGATACC |
| | | TACAAAGCTCTGCAGCACTTCATCAAGCCCCTGCTGGGAAACGGCGACGAGG |
| | | CCGACAAAGATAACGAATTCGACGCCCGCCTGAGAAACGCCTGGGACGCAC |
| | | TGAGCGTGGTGACACCACTGTACAATAAGGTTAGAAACTGGCTGACTAGAAA |
| | | GCCCTACAGCACCGAGAAGATCAAACTGAATTTCGACAATGCTCAGCTGCTG |
| | | GGGGGGTGGGACCTGAATAAGGAGCCCGATTGCACTTCAGTGCTGCTGCGGA |
| | | AGGATGACATGTTCTACCTGGCCATCATGGACAAGAAGTACAACCACGCCTT |
| | | CGATATCGATGAGCTGCCATGCGAGGGCGAGTGCTACGAGAAGGTGGATTAT |
| | | AAGCTCCTCCCCGGCGCCAATAAGATGCTGCCCAAGGTGTTTTTCAGCAAGT |
| | | CAAGAATTTCTGAATTTGCCCCATCTCTGGCCATCCAGAAGAGCTACAACGA |
| | | GGGCACCCACAAAAAGGGGTCCAACTTTTCTATCAGCGACTGTCACCGCCTG |
| | | ATTGATTTTTTCAAGCAGAGCATTGCCAAGCACGAAGACTGGTCTAAATTCC |
| | | CTTTCTCTTTCTCCGACACTAAGAGATATGAGGACATCTCAGGATTCTATAGA |
| | | GAGGTGGAGCAGCAGGGGTACATGCTGAGCTATCGCAACGTGTCCGTGAGCT |
| | | TTATCAATCAGCTGGTGGACGAGGGGAAGCTGTACCTGTTCCAGATCTGGAA |
| | | TAAGGACTTTAGCAAGTACTCTAAAGGGACCCCCAATATGCACACACTGTAG |
| | | TGGAAAATGCTGTTCGATGAAGTGAACCTGGCTGACACCGTTTACAAGCTGA |
| | | ACGGTCAGGCTGAGGTGTTCTACAGGAAGTCTAGCCTGAAACTGGAAAACAC |
| | | AACCATCCACAAGGCCAACCAGACCATTAAGAACAAAAATGTGCAGAATGA |
| | | GAAGAAGACAAGCACTTTCGACTACGACATCGTGAAGAATCGCAGATACAC |
| | | AGTGGATAAATTCCAGTTTCACGTGCCAATCACCCTGAACTTCAAGGCCACC |
| | | GGCGGCGACAACATCAACGCAAACGTGCAGGACATAATCCGGAATAATGGC |
| | | ATCGAGCATATCATCGGCATCGACAGAGGCGAGAGACACCTGCTGTACCTGA |
| | | GCCTGATTGATCTGAAGGGTAACATTGTGAAGCAGATGACCCTAAACGACAT |
| | | CATTAACGAATATAAGGGCAATATCTATAAGACAAACTACAAGGATCTCCTG |
| | | GTGACACGCGAGGGGGACCGCACAGAGGCTAGGAGGAATTGGCATAAGATC |
| | | GAGAATATCAAGGACCTGAAGGAGGGCTACCTGAGTCAGGTGGTGCACATC |
| | | ATAGCCAGAATGATGGCCGAGTACAAAGCCATCGTGGTCCTGGAGGACCTG |
| | | AATATGGGATTTATGCGGGGGCGCCAGAAGATCGAGCGGAACGTGTACGAA |
| | | CAGTTCGAACGGATGCTGATCGATAAACTGAACTACTACGTGGATAAGCAGA |
| | | AAAAGGCCACAGAGAATGGCGGACTGCTGCATGCCCTGCAGCTGGCCAACA |
| | | AGTTCGAGAGCTTTAAGAAGCTGGGCAAACAGTCTGGCTGTCTGTTCTACAT |
| | | ACCTGCTTGGAATACCTCCAAAATTGATCCCGTCACTGGGTTTGTGAATCTGT |
| | | TTGAAATTCACTATGAGAATGTGGACAAGGCCAGGTGCTTTTTCTCAAAGTT |
| | | CGATATCATCCAGTACAACGAGGAGCGCGACTGGTTCGAGTTTGCCTTCGAT |
| | | TACAATGACTTTGGGACCAAAGCTGAGGGCACCAAGTCTAAATGGACCCTGT |
| | | GCACATATGGCACCAGAATTAAAACCTTTCGAAACCCTAACAAACTGAACCA |
| | | GTGGGACAATGAGGAGGTGGTGCTGACCGAAGAGTTTAAGAAGATCTTCAA |
| | | CGAGGCTGGGATCGACATCAACGGGAATATTAAGGACGCAATCTGCCAGCT |
| | | GAAGGAGAAGAAACACCTTGAGAGCCTGATGCACCTGATGAAACTCCTGCTC |
| | | CAGATGAGGAACAGCGTGAGCAACAGCGAGATCGACTACCTGCTGAGCCCC |
| | | GTGGCCGATGAGAATGGGGAGTTTTACGACAGCAGAACATGCGCCCCAACTC |
| | | TGCCAAAGGATGCAGACGCCAACGGAGCGTACAATATCGCTAGGAAGGGCC |
| | | TGTGGGTGATCGAGCAGATCAAACAGACTGCCGACAAGCCCAGGCTGGCCA |
| | | TGACTAACAAGGAGTGGCTGAAGTTCGCCCAGGATAAGCCCTATCTGAACGA |
| | | ATAG |
| 176 | 136 | ATGAATACCTTTAACGAGCTGTCCGGCCTGTACAGCCTGCGGAAGACCCTGC |
| | | AGTTCGAGCTGAAGCCCATCGGAAAGACCCTGGAAAACATCGAGAAAAAGG |
| | | GCATCATCGAGCAGGACACACAGAGAGATGTGGAATATAAGAAGGTGAAGG |
| | | GCATCATCGACAACTACCACAAGGCCTTTATCAAAATGTGCCTGTGGAACCT |
| | | GGAGCTGAAGCTGGAGAGCGATGGCCACTCCGACTCCCTGGAGGACTACGT |
| | | GAGACTGGCCAGTATCATCAGAAGAGGCGAGCTGGACGAGATCGAGTTTTCT |
| | | AAAGTCAAGGACAACCTGCGGAAGCAGATCGTGTCGGCTTTTAAGAATGGG |
| | | AACTCCTATGGCGATCTGTTTAAGGAGGAACTGATCCAGGAACACCTCCCCA |
| | | ACTTTGTGACTGATGAGGCTGAGAAGCAGATGGTGGATAATTTCAGCAAGTT |
| | | CACCACTTACTTCTCCGAGTTCCATAAGAACAGAAAAAATATGTATAGCGAC |
| | | GAGAAGAAGTCAACCGCCATCGCATACAGACTGATCCACGAGAACCTGCCA |
| | | ATCTTCATCGATAACATCAAGACCTTCAAAAAGATTGCCAACACTGAAATCG |
| | | TGAACCACTTTGCCGACATCAAGCAGGCTTTTCAAGAATGTCTGAACGTTGA |
| | | GAACATCGACGAAATGTTCCAGCTGAACTACTTCACCAAGACACTGCCACAG |
| | | GAGCATATCGAGACCTACAATAACATTATTGGCGGGAAAACCAACGAGGAC |
| | | GGGAGCAAAATCCAGGGCCTGAATGAGTATATCAACCTGTATAACCAGCAG |
| | | CAGAAGGATCACAGCAACAGGCTGCCCCTGTTCAAGCCCCTTTATAAGATGA |
| | | TCCTGAGCGACAGAGAAGCCCTGAGCTGGCTGCCCGAAGAGTTTGCCAGCGA |
| | | CGAGGAGATGATTAATGCCATCAACGAGGTGTATGATAGCCTTAAAAACGTG |
| | | CTGGCCAACGACAATAACGGCCTGAAGCACCTGTTGCTGAACATCAACCAGT |
| | | ATGATACGGAGCAGATCTATATCGCTAACGACCTGGGACTGACCGATATTTC |
| | | CCAGCAGATGTTCGGCAAATATGACGTGTTCACCAGCGGCATCAAGAACGAG |
| | | CTGAGAGGCCAGATTTCTCCCTCTGCCAAGGAGAAACGCGAGCCTGAGCTCT |
| | | ACGAGGAGAAGATCAACAAGATCTTCAAATCCGCCAGATCTTTCACTATCAA |
| | | CTACCTGAACAGCTTTGTGCAGGACGGAAAGACAATCCAGAGCTACTTCGCA |
| | | CAGCTCGGCGCCACCAACACAGATTCTGCCCAGTGCATTGACATCTTCACCA |
| | | AGATTGAGATGGCCCACATCGCCGCCACCGATATCCTGGAGGGCAAGCACA |
| | | ACTCCATCGACCAGTCTGATAGCGATATTAAACTGATTAAGGACCTGCTGGA |
| | | TGCTTACAAGGAGCTGCAGCACTTCATAAAGCCACTGCTGGGGTCCGGCGAC |
| | | GAGGCCATGAAGGACAATGAGTTCGACGCTCAGCTGCACTATGCCTGGGACT |
| | | CTCTGAATATTATTACCCCCCTGTACAATAAGGTGAGGAATTGGCTGACAAG |
| | | AAAACCTTATTCCACAGAGAAGATTAAACTGAATTTCGAGAATGCACAGCTG |
| | | CTGGGAGGCTGGGACATGAACAAAGAGACCGATTGTACCTCTGTGCTGCTCC |
| | | GGAAGGACAACATGTACTACCTTGCCATTATGGATAAGAAAAGCAATCACGC |
| | | ATTTGATATTGATGTGCTGCCAAATGAGGGCGACTGCTACGAGAAGGTGGAC |
| | | TACAAGCTGCTGCCCGACGCCTACAAGATGCTGCCAAAAGTGTTCTTCTCCA |
| | | AGAGTCGTATCAACGAGTTCGCACCCTCAAAGGATATTCAGAACGCCTACCA |
| | | GAAGGGCACCCACAAAAAGGGCCCTAACTTCAGCATCTCTGACTGCCACCGG |
| | | CTGATCGATTTTTTCAAACAGAGTATCGCCAAGCACGAGGATTGGCAGAAGT |
| | | TCCCATTCTCTTTCTCAGACACCGACTCATACGACGACATCTCTGGCTTTTAT |
| | | CGCGAAGTGAAACAGCAGGGCTACATGCTGGGCTATAGGAAGGTGTCCGTG |
| | | TCTTTCATTAACCAGCTGATCGACGACGGCAAGCTCTATCTGTTTCAGATCTG |
| | | GAACAAGGATTTTTCCGAGCATTCCAAAGGGATGCCAAATATCCACACCCTG |
| | | TACTGGAAAATGCTGTTCGATGAGAGAAACCTGAGCAACATCATCTACCGGC |
| | | TGAACGGCAAGGCCGAGGTGTTTTACAGACAGAACTCACTGAAGCTGGAGA |
| | | ATACCACTATTCACAAAGCCAACCAGCCTATCAAGAACAAGAACATCCAGA |
| | | ATTCTAAGGAGTGCAGCACCTTTGACTACGATATCATTAAGAACCGACGGTA |
| | | CACTGCAGATAAATTCCAGTTCCACGTGCCCATCACACTGAACTTCAGGTCT |
| | | ACCGGCTCTGACAATATCAACAACAAAGTGAACGATGTGATCAGAAATAAT |
| | | GATATTGAACACATCATTGGCATCGACAGGGGAGAGAGGCACCTGCTGTATC |
| | | TGAGCCTGATTGATCTGAAGGGCAACATCGTGAAGCAGATGACCCTGAATGA |
| | | TATTGTGAATGAGTACAACGGCAACACGTACAAGACCAATTATAAAGACCTG |
| | | CTCGTGCAGCGCGAAGGCGACCGCACCGAGGCAAGGAGAAATTGGCAGAAG |
| | | ATCGAGAACATCAAGGAGATCAAAGAAGGGTACCTGTCCCAGGTGATCCAC |
| | | ATCATCACCAAGATGATGGTGGAATACAAAGCCATTGTGGTGCTGGAAGACC |
| | | TGAATATGGGCTTCATGAGAGGAAGGCAGAAGATTGAGCGCAACGTGTATG |
| | | AGCAGTTCGAGAAGAAGCTGATCGATAAGCTGAACTATTATGTGGACAAAC |
| | | AGAAAGACATCACCGATGCCGGCGGCCTGATGCACGCCCTGCAGCTCGCTAA |
| | | CAAGTTCGAGAGCTTTAAGAAGCTGGGTAAGCAGAGTGGCTGTCTGTTTTAT |
| | | ATCCCTGCCTGGAATACCTCTAAGATCGATCCAGTGACAGGGTTTGTGAACC |
| | | TGCTGGACACTCACTACGAGAATATTGACAAGGCACGGTGCTTTTTTAGCAA |
| | | GTTTGACAGCATCAGATACAACGCCAGCAACGACTGGTTCGAATTCGAGCTC |
| | | GACTACGATAAATTCACCGACAAGGCACGCGGAACCAAGACCCACTGGACC |
| | | CTGTGCAGCTATGGCACCCGCATTCGGACCTTTCGCAACCCTCTGAAGCTGA |
| | | ACCAATGGGACAACGAAGAAGTGGTGCTGACAGAGGAGTTTAAAAAGGTCT |
| | | TCAACAACGCCAATATTGACATCTATGGAAACCTGAAGAACAGCATCTGCTC |
| | | GCTGAATGACAAAACCACCCTGGAGTCTCTGATGCAGCTGATGAAGCTGATG |
| | | GTGCAGATGCGGAATAGCATTACAGGCACTGAGACCGATTATCTGCTGAGCC |
| | | CTGTGACAGACGCCAACGGCAACTTCTACGATTCACGCAACAATATACCTAC |
| | | CCTTCCCATTGACGCCGACGCCAATGGCGCCTATAATATCGCCCGCAAGGGC |
| | | CTGTGGATCATCCAGAAGATTCAGCAGTCTCAGCCCGGGGAGAAACTGAACC |
| | | TAGCTATCTCAAACCGGGAGTGGCTGCAGTTCGCCCAGCAGAGACCCTACCT |
| | | GAATGAGTGA |
| 177 | 137 | ATGAAGACATTCAATGATCTGACCGGCCTGTATAGCCTGAGCAAGACCCTGA |
| | | GGTTCGAACTGAAGCCGGTGGGCAAGACCAAGGATAATATCGAGACAAAGG |
| | | GCATCATTGCTCAGGATGAGAAACGCGCCGAGGAATACAAGAAGGTGAAGG |
| | | ATATCATCGACCGCTATCATAAAAAATTCATCGAGATGTGTCTGGCCAACCT |
| | | GAAGCTGAAGACAATTTCCGACGGCAATAACGACTCTTTGAAAGAGTATGTG |
| | | ACACTGGCCTCAAAGGCAAATAAGGACGAGAAGGAGGACAACGACTTCAAA |
| | | GATGTGAAAACAGCCCTGCGCAAGCAGATCGTGGACGCCTTCAAGAAGGGC |
| | | GGCAGCTATAGTGACCTGTTCAAGAAAGAGCTGATTCAGGTGCACCTGCCCG |
| | | ATTTTGTGACAGACGAGCAGGAGAAGCAGATGGTGGAGAACTTCGGCAAGT |
| | | TCACTACCTACTTTACCGGGTTTAATGAGAATAGGCAGAATATGTACAGTGA |
| | | CGAGGAAAAGAGCACCTCCATCGCATACAGACTGATCCATGAGAATCTCCCC |
| | | ATGTTCATTGATAACATCAAGTCCTTCGCCAAGATCGCCGAACACGAGGACA |
| | | TCGACTTCCTGCCCGATATCGAGAACGGCTTCAAGGAGGAACTGAAGAGGCT |
| | | GAAGGCCCAGAGCATCTCCGAGGTGTTCGACCTGGCCAACTTTACCAACACT |
| | | TTGACCCAATCCCAGATCGATAGCTATAACGCCATTATCGGCGCACGCCACG |
| | | ACGAAAACGGGGATAAAGTGCAGGGCATCAACCAGTACGTGAATCTCTACA |
| | | ACCAAAAGAACAAGGACGCCAGGCTGCCCCTGCTGAAACCCCTGTACAAGA |
| | | TGATCCTGTCAGATCGCGGAGCCCTGTCCTGGCTGCCTGAGGAGTTTGCCAC |
| | | CGACGAGGAAATGCTGGCAGCTATCAACGAGACCCACGGAAACCTGAAGAA |
| | | CGTGATGACCGACGTGCGGAAGCTGCTGCAGAACATCGATAGCTACGACAC |
| | | AGAGCACATTTATATCGCCAACGACAAGGGGCTGACTGACATCTCCCAGCAG |
| | | ATCTTCGGCCAGTACGACGTGTATACCTCTGCCATTAAGGCTGAGCTGCGGG |
| | | ATAGCATCACCCCCAGCGCTAAGGAGCGCAAGGACCCAGAACTGCTGGAGA |
| | | AGAGGATCAATGACATCTTCAAGGCCTCCAAGTCCTTCAGCATCGAATATCT |
| | | GAATAGCCACGTGGACAGCGACAAAACCATTCAATCCTACTACAAGGAGCT |
| | | GGGCGCCTACGACAGGAATGGCGAGCAGCGGATTAATCTGTTTTCCCAGATC |
| | | GAGCTGGCCTACGTGGACGCCCACGATGTGCTGCTGGGAAAACATACCAATG |
| | | TGAACCAGAGCGAGGATAGTATCAAGAAGATTAAAGCCCTGCTGGACGCCT |
| | | ACAAAGCACTGCTGCACTTCATCAAGCCCCTGCTGGGGAACGGCGATGAGGC |
| | | CGACAAGGACAACGAGTTTGATGCTAAGCTGCGCGCCATTTGGGACGAGCTG |
| | | GACATCGTGACCCCTCTGTACGATAAAGTGAGGAACAGGCTGACAAGAAAG |
| | | CCCTACAGTACAGAGAAGATCAAACTCAACTTCGATAATGCCCAGCTGCTGA |
| | | ACGGGTGGGACATGAATAAAGAGCCAGACTGCACCTCCGTGCTGCTGCGCA |
| | | AGGACGGCCAGTACTATCTCGCAATCATGGACAAGAAGAGCAACCACGCCTT |
| | | CGATATCGATGAGCTGCCTTGTAACGGAGAATGCTACGACAAGATGGACTAC |
| | | AAGCTGCTGCCTGGAGCAAACAAAATGCTGCCCAAGGTGTTTTTTAGCAAGT |
| | | CCAGGATCAAGGAGTTTGCTCCCTCCAAGGAGATTTGCGACGCCTACCAGAA |
| | | GGGAACTCATAAGAAAGGGGCCAATTTTAGCATCAAGGATTGCAGAAGGCT |
| | | GATTGACTTCTTCAAGGATAGCATTGCCAAGCACGAGGACTGGTCAAAGTTC |
| | | CCTTTTACCTTCTCCGACACCAGTACTTATGAGGACATCAGCGGCTTCTACAG |
| | | GGAGGTGGAGCAGCAGGGCTACATGCTGGGGTATCGCAAGGTGTCAGTCAG |
| | | CTTCATCAATCAGCTGGTGGATGAGGGAAAGCTGTACCTGTTCCAGATTTGG |
| | | AACAAGGACTTTAGCGAGTATTCAATGGGGACCCCCAACATGCACACCCTGT |
| | | ACTGGAAGATGCTCTTCGATGAGCGGAATCTGGCCAACGTGGTGTACAAACT |
| | | GAATGGCCAGGCCGAGGTGTTCTACCGGAAGAAAAGCCTAGACCTGAACAA |
| | | GACTACCATCCATCGAGCCAACCAGCCAATCGCTAATAAAAACATGCAGAAC |
| | | GAGAAGAGAGAAAGTACCTTCTGCTACGATATCGTGAAAAACAGGAGATAC |
| | | ACCGTGGACAAGTTCCAGTTCCACGTGCCGATCACAATTAACTTTAAAGCTA |
| | | CAGGGTCAGACAACATCAACGCCTCCGTCCTGGATGTGATCAGAAACAACGG |
| | | GATCGAGCATATCATCGGGATCGATCGGGGAGAGAGACACCTGCTGTACCTG |
| | | TCTCTGATCGACATGAAGGGCAATATTGTGAAGCAGATGACCCTGAATGACA |
| | | TTATTAACGAGTACAAGGGCAATACATATACCACCAACTACAAAGAACTGCT |
| | | GCAGGCACGGGAGGGCGACAGAAAAGAGGCACGGCAGAATTGGCAGAAAA |
| | | TCGAGAACATCAAGGAACTGAAGGAGGGCTATCTGAGCCAGGTCGTGCACG |
| | | TGATTACCAAGATGATGGTGGAGTACAAGGCCATCGTGGTCCTGGAGGACCT |
| | | GAATGGCGGCTTCATGAGGGGGCGCCAGAAGATCGAGAGACAGGTGTACGA |
| | | GAAGTTTGAGAAAATGCTGATCGACAAGCTGAACTACTACGTGGATAAGCA |
| | | GAGAGACGCTAACGAAAACGGGGGCCTGCTGCACGCCTACCAGCTGGCCAG |
| | | CAAATTCGATACCTTCAAGAAACTCGGAAAGCAGAGCGGTTGCCTGTTTTAC |
| | | ATCCCAGCCTGGAACACCTCCAAGATCGACCCTGTGACCGGATTTGTCAACA |
| | | TGCTGGATACCCGATATGAGAACGCCGACAAGGCCCGCAACTTCTTTTCCAA |
| | | GTTCAAGTCCATCAATTACAATGCTGACAAGAACTGGTTCGAGTTCGTGATA |
| | | GACGACTACTCAAAGTTTACGGACAAGGCCAAGGATACCAGAACCGATTGG |
| | | GTGCTGTGCACATACGGCACCAGGATCAAGACTTTCCGGAATCCTGAGAAGC |
| | | TGAACCAGTGGGATAACAAGGAAATTGTGCTGACCGACGAATTCAAGAAAG |
| | | TGTTTATGGAGGCCGGGATCGACATCAACGGCAACCTGAAAGAGGCTATTTG |
| | | CACTCTGACAGAGAAAAAGCATCTGGAGTCCCTGATGCAGCTGATGAAGCTG |
| | | CTGGTGCAGATGAGGAATTCTGAGACCAACTCTGAGGTGGACTACCTCCTGA |
| | | GCCCCGTCGCCGACACCGAGGGACATTTTTATGACAGCAGAAACTGCGGGGA |
| | | CAATCTGCCCAAGGACGCCGACGCTAACGGCGCCTACAATATCGCAAGAAA |
| | | GGGCCTGTGGGCCGTGATGAAGATTAAGGCCAGCAAGCCCCAGGAGAATCT |
| | | GAAGCTTGGAATCTCTAACAAGGAGTGGCTGCAGTTCGCTCAGGAAAAGCCT |
| | | TACCTGAACGACTAA |
| 178 | 138 | ATGAAGAACATCCTGGAGCAGTTTGTGGGCCTGTACCCCCTGTCTAAGACAC |
| | | TCAGATTTGAACTGAAGCCCCTGGGCAAAACTCTGGAGCACATCGAGAAGA |
| | | AAGGCCTGATCGCCCAGGACGAGCAGAGGGCCGAAGAGTACAAGCTGGTGA |
| | | AGGACATCATTGACAGATACCATAAGGCCTTTATCCACATGTGCCTGAAGCA |
| | | CTTCAAGCTGAAGATGTACAGCGAGCAGGGGTATGATTCCCTGGAGGAGTAC |
| | | AGAAAGCTGGCTAGCATCTCTAAGCGAAACGAGAAGGAAGAACAGCAGTTC |
| | | GACAAAGTGAAAGAGAACCTGAGAAAGCAGATCGTGGACGCCTTCAAAAAC |
| | | GGAGGAAGCTACGACGACCTGTTCAAGAAGGAGCTGATTCAGAAGCATCTG |
| | | CCTAGATTCATCGAGGGCGAGGGCGAGGAGGAGAAGCGGATCGTGGATAAC |
| | | TTCAACAAGTTCACCACCTACTTCACCGGCTTCCACGAGAACAGGAAGAATA |
| | | TGTACTCCGACGAGAAGGAGAGCACCGCAATCGCCTACCGGCTGATTCACGA |
| | | GAATCTGCCTCTGTTCCTGGACAACATGAAGAGCTTTGCCAAGATTGCCGAA |
| | | AGCGAAGTGGCTGCCCGGTTTACCGAGATAGAAACAGCCTACCGGACCTACC |
| | | TGAATGTGGAGCACATCTCTGAGCTCTTTACCCTCGATTACTTTTCAACCGTG |
| | | TTGACACAGGAGCAGATTGAGGTGTACAACAATGTGATCGGCGGGCGGGTG |
| | | GATGATGACAACGTGAAGATACAGGGCCTCAACGAGTACGTGAACCTGTAC |
| | | AACCAGCAGCAGAAGGACCGGAGCAAACGGCTGCCCCTGCTGAAGAGCCTC |
| | | TATAAGATGATCCTGAGCGATAGGATTGCTATTTCCTGGCTGCCAGAAGAAT |
| | | TCAAGAGTGATGAGGAGATGATCGAAGCCATCAACAATATGCATGATGATCT |
| | | GAAAGATATCCTGGCCGGAGATAACGAAGATTCACTGAAGTCTCTGCTGCAG |
| | | CACATCGGACAGTATGACCTGTCTAAGATCTACATTGCCAATAACCCAGGCC |
| | | TGACCGATATCTCTCAGCAGATGTTCGGATGCTACGACGTGTTCACCAACGG |
| | | AATCAAGCAGGAACTGAGAAACTCCATCACCCCAACCAAGAAGGAGAAGGC |
| | | CGATAACGAGATCTACGAGGAGAGGATCAATAAGATGTTCAAGAGCGAGAA |
| | | ATCATTCAGCATCGCCTACTTGAACTCCCTGCCTCACCCAAAGACTGATGCTC |
| | | CCCAGAAGAACGTGGAGGACTATTTCGCTCTGCTGGGGACCTGTAATCAGAA |
| | | CGACGAGCAGCAGATCAATCTCTTTGCTCAGATTGAGATGGCCAGACTGGTG |
| | | GCCTCCGACATTCTGGCCGGAAGGCATGTGAATCTGAATCAGAGCGAGAATG |
| | | ATATTAAACTGATTAAGGATCTGCTGGACGCCTATAAAGCCCTGCAGCACTT |
| | | CGTGAAACCACTGCTGGGCAGCGGCGATGAGGCTGAGAAAGACAACGAGTT |
| | | TGATGCTCGACTGAGGGCCGCGTGGAACGCTCTGGATATTGTGACCCCTCTG |
| | | TACAACAAGGTGCGAAACTGGCTGACCAGGAAGCCTTACAGCACCGAGAAA |
| | | ATCAAACTGAATTTCGAGAATGCCCAGCTGCTGGGCGGCTGGGATCAAAATA |
| | | AGGAGCCAGACTGCACATCCGTGCTGCTGAGGAAGGACGGGATGTACTACCT |
| | | TGCCATCATGGACAAGAAAGCCAACCACGCCTTCGACTGTGACTGTCTGCCC |
| | | TCCGATGGGGCCTGCTTCGAGAAAATCGACTACAAGCTGCTGCCTGGCGCCA |
| | | ACAAAATGCTGCCAAAGGTGTTCTTCTCCAAGTCTCGCATTAAGGAGTTCTCT |
| | | CCCTCTGAGAGCATCATCGCCGCCTACAAGAAGGGAACCCATAAGAAGGGC |
| | | CCAAATTTCTCTCTGAGCGACTGCCACCGGCTGATCGACTTTTTCAAGGCATC |
| | | AATCGATAAACACGAGGATTGGTCTAAATTCCGGTTTCGGTTCTCCGACACC |
| | | AAAACTTACGAGGACATCTCCGGATTTTACCGCGAGGTGGAGCAGCAGGGCT |
| | | ACATGCTGGGTTTCAGGAAAGTGAGCGAGACTTTTGTGAATAAGCTGGTGGA |
| | | CGAGGGCAAGCTGTATCTCTTTCACATCTGGAATAAAGACTTCAGTAAGCAC |
| | | AGCAAGGGCACACCCAACCTGCATACCATCTACTGGAAGATGCTGTTCGACG |
| | | AGAAGAACCTGACTGACGTGGTGTACAAGCTGAACGGCCAGGCCGAGGTCT |
| | | TCTATAGAAAGAAATCTCTGGACCTGAATAAAACTACCACTCACAAGGCCCA |
| | | CGCCCCTATCACAAACAAGAACACCCAGAACGCCAAGAAGGGGTCCGTGTT |
| | | CGACTATGACATCATCAAGAATCGCCGGTATACAGTGGATAAGTTCCAGTTC |
| | | CACGTGCCAATCACTCTGAATTTTAAGGCAACCGGCCGGAATTACATCAATG |
| | | AGCACACCCAGGAAGCCATCAGGAACAACGGGATCGAGCACATCATCGGCA |
| | | TCGACAGAGGCGAGCGGCATCTGCTCTACCTGAGTCTGATCGATCTGAAGGG |
| | | AAACATCGTGAAGCAAATGACTCTGAACGATATTGTGAACGAGTATAACGG |
| | | GCGGACCTACGCCACCAATTACAAGGATCTGCTGGCCACCCGGGAGGGAGA |
| | | GAGAACAGATGCACGCCGCAACTGGCAGAAAATCGAGAATATTAAGGAGAT |
| | | TAAGGAAGGGTACCTCTCTCAGGTGGTGCATATCCTGTCTAAGATGATGGTG |
| | | GATTATAAGGCAATCGTGGTGCTGGAGGATCTGAACACCGGCTTCATGAGGA |
| | | GCCGGCAGAAAATTGAGAGACAGGTGTATGAAAAGTTTGAGAAAATGCTGA |
| | | TCGACAAGCTCAATTGCTATGTGGATAAGCAGAAGGATGCCGACGAGACTG |
| | | GGGGGGCCCTGCACCCCCTGCAGCTGACCAACAAGTTCGAGTCCTTCCGGAA |
| | | ACTGGGAAAACAGAGTGGCTGGCTGTTCTATATTCCAGCATGGAACACCAGT |
| | | AAGATCGACCCCGTGACAGGATTCGTCAATATGCTGGACACCCGCTACGAAA |
| | | ATGCCGACAAGGCAAGATGCTTCTTCTCCAAGTTCGATAGCATCAGGTACAA |
| | | CGCCGACAAGGACTGGTTCGAATTCGCAATGGACTACAGCAAATTCACTGAT |
| | | AAGGCCAAGGACACTCATACATGGTGGACTCTCTGTAGCTACGGCACAAGAA |
| | | TCAAGACCTTCAGAAACCCCGCCAAGAACAATCTGTGGGACAACGAGGAAG |
| | | TGGTGCTGACAGATGAGTTCAAGAAGGTGTTCGCCGCCGCCGGCATCGACGT |
| | | GCATGAGAATCTGAAGGAGGCAATTTGCGCCCTGACCGACAAAAAGTACCT |
| | | GGAACCCCTGATGCGCCTGATGACACTGCTGGTCCAGATGAGGAATTCCGCC |
| | | ACCAACAGCGAAACCGATTACCTGCTGAGTCCAGTGGCCGATGAGTCTGGCA |
| | | TGTTTTATGATTCCCGGGAGGGCAAGGAAACTCTGCCAAAGGACGCCGACGC |
| | | CAATGGGGCCTATAATATCGCCAGGAAAGGCTTGTGGACTATCAGAAGGATC |
| | | CAGGCCACCAATAGCGAGGAGAAAGTGAACCTCGTGCTGAGCAACAGAGAA |
| | | TGGCTGCAGTTCGCCCAGCAGAAACCATACCTGAATGATTGA |
| 179 | 139 | CTGACCAGGAAGCCCTACAAGACCGAGAAAATCAAGCTGAACTTTGAGAAT |
| | | TCCCAGCTGCTGGGCGGCTGGGACGTGAACAAGGAGCCAGATTGCACCTCAG |
| | | TGCTGCTGAGAAAAGATGGCATGTACTACCTGGGCATCATGGATAAAAAGGC |
| | | AAACAAGAGTTTCTACTGCGATTGCCTGCCATCAGAGGGCAGCTCTTACGAG |
| | | AAGGTGGACTACAAACTGCTGCCAGGGGCCAACAAAATGCTGCCCAAGGTTT |
| | | TCTTTTCCAAGAGCCGGAAGTCGGAGTTCGCCCCTAGCGAAGTGATCACAAA |
| | | GGCCTACGAGAACGGAACACACAAGAAGGGGGCTAACTTTAGCCTCTCAGA |
| | | TTGTCACAGGCTGATCGACTTTTTCAAGGCCAGTATTAATAAGCATGAGGAC |
| | | TGGAGCAGGTTCGGCTTTATCTTCTCTGAAACAAATACTTACGAGGATATGG |
| | | TGGGCTTTTACAGGGAGGTGGAGCAGCAGGGCTACATGCTGGGCTTTAGGAA |
| | | CGTGTCCGAGGAGTACATTGATCGGCTGGTTGACGATGGGAAACTGTACCTG |
| | | TTTCAGATCTGGAACAAAGACTTTAGTGAGCACTCCAAGGGCACCCCCAACC |
| | | TGCACACAATCTACTGGAAGATGCTGTTCGACGAACGCAACCTGGAGAACAT |
| | | CGTGTATAAACTGAACGGACAGGCTGAGCTGTTTTACAGGAAGAAGAGCCTG |
| | | GATCTGTGCAAGACCACCGTGCACAAGGCCCACCAGTCTGTGGCCAATAAGA |
| | | ACCCTCAGAATGACAAGCGGGAGTCTATTTTTGAATACGACATTATTAAGAA |
| | | CAGACGCTATACTGTGGACAAGTTCCAGTTTCACGTGCCCATTACTATTAACT |
| | | TCAAGGCCACAGGGGATGACAGACTGAATAGCGCCACCCTGGAGGCCATTA |
| | | GGGACGGAGGCATCGAACACATCATCGGCATTGATAGAGGCGAACGCCACC |
| | | TGCTGTACCTGAGCCTGATCGACCTGAAAGGCAATATCGTGAAGCAGTTCAC |
| | | CCTGAACGAGATCGCCAGCGAATACAACGGCGCCCCCTGTCCTCCAACCAAC |
| | | TATAAGGATCTGCTGGTGGCCCGGGAAGGGGACAGAAACGAGGCCCGGAGA |
| | | AATTGGCAGAAGATCGAGAACATCAAAGAAATCAAGGAAGGGTACCTGTCA |
| | | CAGGTCGTGCATATTATCGCCAAAATGATGGTGGAGTACAAGGCCATCGTGG |
| | | TGCTGGAGGACCTGAACATGGGCTTTATGAGAGGTAGACAGAAGATCGAAC |
| | | GCCAGGTGTACGAAAAGTTCGAGAAGATGCTGATCGATAAGCTGAATTGCTA |
| | | CGTGGATAAGCAGAAGGAGGCCACCGATATCGGCGGAGTGCTGCACCCACT |
| | | GCAGCTGACAAGCAGATTCGAAAGTTTTCGGAAGCTGGGAAAGCAGAGCGG |
| | | ATGGCTGTTTTACATTCCTGCCTGGAACACTAGCAAGATTGACCCTGTGACCG |
| | | GCTTCGTGAATATGCTGGACACACGGTACGAGAACGTGGACAAAACTAGAT |
| | | GCTTCTTCTCTAAGTTTGACGTGATTCGCTATAACGGGGACAAGGACCTGTTC |
| | | GAGTTCACATTTGACTACGATAAGTTTACAGACAAAGCCAAGGGAACCAGA |
| | | ACTAAGTGGACACTGTGCACCTACGGCAGCAGAATTAAAACTTTCAGAAATC |
| | | CAAAGAAGAACAATCAGTGGGACAACGAGGAAATCGTGCTCACAGACGAGT |
| | | TCAAGAAGGCCTTCGCCGACGCCGGCATTGACATCGAGGGCAATCTGAAAG |
| | | ATGCCATCTGCAGCCTGACGGAGAAGAAGCACCTGGAGCCTCTGATGAACCT |
| | | CATGAAGCTCCTGCTGCAGATGCGGAACAGTAAGACCGGCACCGAGATCGA |
| | | CTATCTGTTGAGCCCCGTGGCTGATGCAGACGGAAACTTCTACGACAGCCGC |
| | | AACGAGATCTCCACCCTGCCCAAGGACGCTGACGCCAACGGCGCATACAAC |
| | | ATCGCCCGGAAGGGCCTGTGGGCCATCCGGAAGATCCAGAGCGCACCATCC |
| | | GGAGAGAAACCCAATCTGGCCATTAGCAACAAAGAGTGGCTGCAGTTTGCCC |
| | | AGCAGAAGCCCTATCTGGATGACTAA |
| 180 | 140 | ATGAACACATTTAACCAGTTCACCAACCTATATAATGTGCAGAAGACCCTTT |
| | | GTTTTGAGCTCCAGCCCGTAGGAAAAACTAGGGAGAACATCGAGGAGGACG |
| | | GATTACTCAAACAGGACGAAGAGAGAGCCGAGAACTACAAGAAGGTGAAAG |
| | | GCTTCATAGATGAATACCATAAGCAGTACATTAAGGACCGCCTTTGGAATTA |
| | | TGAACTGCCTCTGAAAGGTGAGGGCAAACGCAACAGTCTGGAGGAGTACCA |
| | | ACAGTTTTACGAGCTGTCCAAGCGGGACGCAAATCAGGAGGCAACTTTCACA |
| | | GAAATCAAGGATAACCTGCGCGCTATCATAGCTAAAAGACTTACCGAAAAG |
| | | GGCTCGGCATACGAGCGGATTTTCAAAAAGGAACTGATCCGGGAGGACCTC |
| | | ATTGAATTTCTCGATAAGGAAGAAGACAAGGAGCTGGTGAGACAGTTCTCCG |
| | | ATTTCACTACCTATTTCACCGGGTTTCATGAAAATCGCGCAAACATGTATAAA |
| | | GATGAGGAACAGAGTACGTCTATCGCTTACCGACTCATCCATCAGAATCTGC |
| | | CGAAGTTCATGGATAATATTAAGGCATTTTCGGCAATAGCCCAGACACCAGT |
| | | TGCGGAACACTTCAAGGAACTGTATGCTCGTTGGGAGAGTTATTTGAATGTT |
| | | AGTTCCATCGACGAGATGTTCAGACTGGATTACTTTTCTCATACCCTGACTCA |
| | | GCCTCATATAGAGGTGTACAATTCCATAATTGGCAAGAGAATCTTGGAGGAT |
| | | GGGACAGAGATCAAGGGGATTAACGAATATGTCAACCTCTACAACCAGCAA |
| | | CAAAAGGACAAAAAGCTCCCCTTGTTTGTGCCCCTGTACAAACAGATACTGT |
| | | CAGACAGGGAACGACTGAGCTGGCTGAGTGAGGAGTTCGATAGCGATGCTA |
| | | AAATGCTCAAAGCCATCAATGAGTGCTATGATCACCTGCACGATCTCCTGAT |
| | | GGGCAAAGAGAACGAAAGCCTCTGCGAGCTTCTGAAGCATTTGACGGATTTC |
| | | AACCTCTCACAGATTAATATCACCAACGACCTGTCTCTTACTGATATTAGCCA |
| | | AAGCATGTTTGGGCGGTATGATGTTTTTACCACGGGGTTGAAAAATACCCTT |
| | | AAGATCTCCACACCACAAAAGCGCGATGAGAAGGAGGAAGCTTACGAGGAC |
| | | AGAATTACTAAGCTGTTTAAAGCGTGCAAGAGCTTTTCAATCGCAGAGCTCA |
| | | ATGGTTTGCAACTACCGGTCGCAGAGGATGGAGGGCACAAAAGAGTAGAAG |
| | | ACTATTTCATAAGCCTGGGCGCTGTCGGAAAAGAAAAAAATCTGTTCGAACA |
| | | GATCGAGGAGGCCTATACTGAGGCTCTCCCCATTCTGCAGCTTAAAGAAACA |
| | | GACGATACACTCAGCCAGAACAAGGCTGCTGTGGCCAAAATTAAGGATCTCT |
| | | TGGACGCCTTTAAAAATCTACAGCACTTTGTGAAGCCCTTGCTTGGTTCCGGC |
| | | GAAGAAAACGAAAAAGACGAAGTGTTTTATGGGGCCTTTCAGACATTATGG |
| | | GATGAGTTGGATGCAGTCACCCCCCTCTATAATAAAGTAAGGAACTGGCTGA |
| | | CTAGGAAACCTTACAGCACGGAGAAAATTAAGCTGAATTTTGACAACGCGCA |
| | | ACTCCTAGATGGGTGGGACGAAAACAAAGAAACAGCCAATGCTTCAATTATC |
| | | CTTTGTAAGGACGGGTTTTATTACCTGGGTATCGTTAAAAAGGACAATCGGA |
| | | AACTATTGGGCATGCCCATGCCTTCCGACGGCGAATGTTATGATAAGGTCGT |
| | | CTACAAGTTTTTCAAAGACATCACCACAATGGTGCCTAAATGCACAACTCAA |
| | | AAGAAGGATGTCGTCGCACATTTCGCACACTCCAACGAGGATTACATTCTGT |
| | | TCGACAAAAAGACCTTCAATGCACCAGTGACGATTACCAAGGAGATCTACGA |
| | | GCTCAACAATATTCTGTATAACGGCGTTAAGAAGTTTCAGATTGAGTACCTTC |
| | | GTTCTACTGGGGATAAGTCTGGATACGAGCATGCTGTCTTCACTTGGAAGAC |
| | | CTTTTGTCTCCAATTCCTGAAAGCCTATAAATCTACCAGCATCTATAACCTAA |
| | | AGTTAGTGGAGCAACACATCGACTCCTACTACGATCTGTCTAGTTTCTATTCT |
| | | GCCGTTAATCTGTTGTTGTACAACCTGAGTTATCGGAAGGTTTCTATGTCATA |
| | | CGTTCATTCATTGGTCGAGGAAGGAAAACTGTTTTTGTTCCGAATCTGGAAC |
| | | AAGGATTTTTCCGAGTACAGCAAGGGCACACCAAATCTTCACACCCTGTATT |
| | | GGAAAATGTTGTTCGACGAAAGAAATCTTGCCGACGTGGTATTCAAACTGAA |
| | | TGGTCAGGCTGAAGTGTTCTACAGAAAGGCCAGCATTAAGCAGGAGAATAG |
| | | AATTATTCACCCGGCCCACCAGGCTATCAACAATAAGAACCCACTCAACAGA |
| | | ACCCCTACCAGCACATTCGACTACGATATCATCAAAAATAAGCGCTACACAG |
| | | TGGACAAGTTCTTATTCCACGTGCCGATTACCATTAATTTTAAGGCCAAGGG |
| | | ACTGACGAATATTAATCCACTTGTCCTTGACGTTATCCGGAAGGGTGGCTTCT |
| | | CACATATTATTGGCATCGATCGGGGGGAACGTCACCTCTTGTACCTGTCACTG |
| | | ATCGACTTAAAAGGCAACATCGTTAAGCAGATGACTTTGAACGAAATTATCA |
| | | ACGTGTACCGGGAGCAAACATATGTGACAAATTATCACAACCTACTGGCCCA |
| | | ACGAGAGGGAGATCGCACCAAAGCACGAAGGAGCTGGGACACTATCGAAAA |
| | | CATTAAAGAACTCAAAGAGGGATACCTGTCTCAGGTCGTGCATGTGATCAGC |
| | | AAGATGGTGGTTGAGTACCACGCGATAGTCGTGCTGGAAGATCTTAATATGG |
| | | GATTCATGCAAAGTAGGCAGAAGATCGAGAGGCAGGTGTACGAAAAATTCG |
| | | AGAAGATGCTGATCGATAAACTCAACTGCTACATATACAAACAGGTCGATCC |
| | | CACATCGGAGGGAGGTGTGTTACACGCTCTGCAGCTTACCAACAAGTTCGAG |
| | | AGCTTTCGGAAGCTGGGAAAGCAAAGTGGTTGCCTCTTCTATATCCCTGCCT |
| | | GGAATACAAGCAAAATAGACCCCCTAACTGGCTTTGTGAACTTCATAAACCC |
| | | CAAGTATGAATCTATTCAGGCGGCCAGGGATCTCATCGGCAAGTTTGAGGAC |
| | | ATCCGATACAACCCAGAAAAGAACTATTTCGAGTTCCACATCAAAGACTACG |
| | | CTGCGTTCAACCCAAAGGCCAAATCTTCAAGACAGGAGTGGGTGATCTGTAC |
| | | TAAGGGGACTAGGATTAGGACGTTTAGGAACCCTGACAAAAACAACGAGTG |
| | | GGACAGTGAGGAAATAGTACTGACCGAGAAGTTTAAGGAGCTGTTTGACTCC |
| | | TACGGCATTGACTACAGGTGTAATCTGTTAGCGAGCATACTAATCCAGACAA |
| | | AGAAAGACTTTTTCCATAATGAGGACGTGAAGAAGCCTTCTCTGCTGTCACT |
| | | CCTGAAATTAACCCTTCAGTTACGCAACTCCCACATAAATTCCGAGGTAGAC |
| | | TATATTCTCTCACCAGTAGCCGACGCCAAAGGATCCTTTTATGACTCCCGCAC |
| | | CTGCGGTTCTAGTCTGCCCAATAATGCCGACGCCAATGGGGCCTTTAACATT |
| | | GCACGTAAGGGCCTGATGTTAGTGGAACGCATCCGGTCCATAAAAGATGATG |
| | | AAAAACCTGCCTTAACTATCACCAATGAAGAATGGCTGCATTATGCCCAGGC |
| | | TCAGTGA |
| 181 | 141 | ATGAAGTCTCTGACCAATCTGTACCCCGTGAGCAAGACTCTGAGGTTCGAGC |
| | | TTCAGCCTATTGGAAAGACTAAGGAGAACATCGAAAAGCACGGGATCCTGTC |
| | | TCGGGACGAGCAGCGGGCTGAGGATTATATTACCGTGAAGAAGTACATTGAC |
| | | GAGTACCACAAGCAGCTGATCAAGGATCGGCTCTGGAACTTTAAGCTGCCCA |
| | | TGAAGAGCGACAGCAAGCTGAACTCCCTCCAGGAATACCAGGAACTGTACG |
| | | AGCTGTCCAAGAGAGACGCCTGCCAGGAGGACAGATTTACCGAGCTGAAGG |
| | | ACAACCTGCGGGCCATCATCGCCAAGCAACTGACTGGGGGGACCGCTTATGG |
| | | TCGGATTTTCAAGAAGGAGCTGATTCGAGAGGACCTGATCGACTTCCTGACC |
| | | CAGGAGGAGGAGAAGGAGACAGTGCGCCAGTTCGCCGATTTCACAACTTAG |
| | | TTCACTGGCTTCCACGAGAACAGGAAGAACATGTACAGTGCCGAGGAGAAG |
| | | TCTACCGCTATCGCCTACCGGCTGATCCACCAGAACCTGCCTAAGTTTATGGA |
| | | CAACATGAAGGCCTTCGCCAAAATCGCCAAGAGTCCTGTCGCCGAAAAGTTT |
| | | GCCAACATTTACAAGGAGTGGGAAGATAGCCTCAACGTGTCCTGCCTTGAGG |
| | | AAATCTTCCAGCTGGACTATTTCTCCGAAACTCTGACCCAGCCCCATATCGAG |
| | | GTGTACAATTACATCATTGGCAAGAAGACCAAGGAAGACGGCAATGACGTG |
| | | AAGGGCATCAATGAATATGTGAATGAGTACAACATGAGGCACAAGGACAAC |
| | | CCTCTGCCTCTGCTTGTGCCCCTGTACAAACAGATCCTTAGCGATAGAGAAA |
| | | AGCTGTCCTGGATCGCCGAGGAGTTTGATTCCGACGAGAAGATGCTGTCCGC |
| | | GATTAACGAGAGCTACAACTCCCTGCATGATGTGCTGATGGGCGAAGAGAAC |
| | | GAGAGCCTGAGGTCTGTGCTGCTGCACATTAAGGACTACAACCTGGAGAGGG |
| | | TGAATATTAACTCAGAGTCCCTGACCGACATCAGCCAGCACATCTTTGGCAG |
| | | ATACGACGTCTTCACCAATGGTATTAAAGCCAAGCTGCGCGGAAAGAACCCC |
| | | AAGAAAAGGAATGAGTCTGACGAAAGCTTTGAAGACAGAATCACAAAAATC |
| | | TTTAAGACCCAAAAGAGCTACAGCATCGCCTACCTGAACAACCTGCCCCAGC |
| | | CCACCATGGAGGATGGAAGGGTGAGAACAATTGAGGATTATTTCATCAGCTT |
| | | GGGCGCCATCAACATCGAGGCAAAGCAGAAGATCAATCTGTTCGCCCAGATT |
| | | GAGAACGCATACCACGACGCCTTCACCATTCTGAAGAGGACCGACACCGAC |
| | | GACACTCTCTCCCAGGATAAGAAGGCAGTGGAGAAGATCAAAGTGCTGCTG |
| | | GATGCCTTCAAGGACCTGCAGCACTTTATCAAGCCCCTGCTGGGCTCTGGCG |
| | | AGGAAAATGAGAAGGATGAGCTGTTCTATGGCATCTTTCAGCTGATCTGGGA |
| | | CGAGCTGGAGGCTATCACCCCACTGTATAACAAGGTGAGGAACTGGCTGACC |
| | | CGCAAGCCATACAGCACAGAGAAGATCAAGCTGAACTTCGATAATGCCCAG |
| | | CTGCTGGACGGATGGGATGAAAACAAGGAAACAGCTAACGCCTCAATTATC |
| | | CTGTGCAAAGACGGCCTGTACTACCTGGGGATCCTGAACAAAGATTACCGGA |
| | | AGCTGCTGGGGATGCCTATGCCAAGCGAGGGCGACTGCTACGATAAGGTGGT |
| | | GTACAAGTTCCTGAAAGACATCACCACGATGGTGCCAAAATGTACTACTCAG |
| | | AAGAAGGAAGTGGTGGCCCACTTTGGCCAGAGTGTGGAGGATTACGTCCTGT |
| | | TCGATCCCAAGACCTTCAATGCCCCTGTGACCGTGACTAAGGAGATCTTTGA |
| | | CCTGAACAATGTGCTGTACAATGGGGTGAAGAAGTTCCAGATCGAGTATCTG |
| | | CGCAGCACTGACGACTCACTGGGCTACGAGCACGCCGTGTCCACCTGGAAGA |
| | | GCTTCTGCATGCAGTTTCTTAAAGCCTACAAGTCTACTAGTATCTATAACCTG |
| | | GCCTCCGTGGAGCAGAAGATGAACTCTTACTCTGACCTGTCCAGCTTCTACA |
| | | AAGCCGTGAATCTGCTCCTGTATAACCTCAGCTATAGGAAGGTGAGCGTGGA |
| | | TTACATTCACAGCCTGACCGAGGAGGGCAAACTGTATCTGTTCAGAATCTGG |
| | | AATAAAGACTTCTCCGAGTTTAGCAAAGGAGCTCCCAACCTGTTTACCCTGT |
| | | ATTGGAAGATGATCTTCGACGAACGGAACCTGGACAACGTGGTGTACAAACT |
| | | GAACGGCCAGGCCGAGGTGTTTTTCCGCAAGAGCAGCATTAAGCCCGAGAA |
| | | CAGAGTGATCCACCCCGCCCACAGACCCATCGACAATAAGAACGAGCAGAA |
| | | CAAGAAACGGACCAGCACCTTCAAATACGACATCATTAAGGATTATAGATAT |
| | | ACAGTGGACAAGTTCCAGTTCCACGTGCCAATCACTATTGGCTTTAAGAGCG |
| | | AAGGACAGACAAATATCAATTCCCGGGTGCAGGATATTATCCGGAGAGGGG |
| | | GGTTTACTCATATCATCGGCATCGACAGGGGCGAGCGCCACTTACTTTACCT |
| | | GTCCCTGATAGACCTCCGCGGCAACATCGTGATGCAGAAGACTCTGAATGTG |
| | | ATCTCTCGGGAAGTGCGGGGCGTGACCTATAGCACAAACTACCGGGACATGC |
| | | TGGAGAAGAGAGAAGGTGACAACAAAGAAGCCAGGCGGTCTTGGGGCGTGA |
| | | TTGAGAGCATCAAGGAGCTGAAGGAGGGCTACCTGAGCCAGGCCATCAGGG |
| | | AGATCGCCAACATGATGGTGGAGTATAATGCCATCGTGGTGCTGGAAGACCT |
| | | GAACCAGGGCTTCATGCGCGGCAGACAGAAAATCGAACGGCAGGTCTATGA |
| | | GAAGTTCGAGAAGATGCTGATTGACAAGCTGAACTGTTACGTGGACAAGCA |
| | | GATCGCCCCTAGCAGCATCGGCGGCGCCCTGCATCCCCTGCAGCTGACCAAC |
| | | AAGTTTGAGAGCTTCCGGAAGCTGGGAAAACAGAGTGGCTGCTTGTTTTATA |
| | | TTCCGGCCTGGAACACCTCCAAGATCGACCCTGTGACCGGCTTCGTGAATCT |
| | | CTTCGACACACGCTACGACACCAGGGAGAAAGCTCGCATGTTCTTCAGCAAA |
| | | TTCAAAAGAATTAAGTTCAACACAGAGAAGGATTGGTTCGAGTTCGCCTTCA |
| | | ACTACAACGACTTCACCTCCAAGGCTGAGGGGACTAGGACAGAATGGACCCT |
| | | CTGCACCTACGGGGAGAGAATCAGGCAGTTCAGAAACCCCGAGAAGAACCA |
| | | CAACTGGGACGACGAGACCATCGTGCTGACAGACGAGTTCAAAAGACTGTTC |
| | | TGTGAGTACGGCATTGATATTCATGGCAACCTGAAGGAGAGCATTGTGGCTC |
| | | AGTCCGATGCCAAATTCTTCCGCGGCCTGCTGGGTCTGATGAAGTTGCTGCTG |
| | | CAGATGAGGAACTCCATCGCCAATTCCGAGGAGGATTACCTGCTCTCTCCCG |
| | | TGATGGATGAAAAGGGGTGTTTCTTTGACTCACGCGATAATGACGGAACCCT |
| | | ACCAGAGAACGCCGACGCCAATGGCGCCTACAACATCGCAAGAAAAGGCCT |
| | | GTGGATTATCCGGAAGATCCGGGAAACCGCCGAGAATGAGAAGCCCAGCCT |
| | | GAAAATCACCAATAAGCAGTGGCTGCTGTTCGCCCAGAGCAAGCCTTACCTG |
| | | AACGACTGA |
| 182 | 142 | ATGAACACCAGCAACCTGTCCAGATTCACCAATCTGTACAGCATTTCCAAGA |
| | | CCCTGAGGTTTGAGCTTCAACCTCTGGGCAAGACCAAAGACTACATTGAGAA |
| | | GAATGGGATCCTCATGCGCGACGAGAAGAGGGCCGAGGACTACAAGACCGT |
| | | GAAGGGCATCATCGACGAGTACCACAAGAAGTATATCAAGTCCCGCCTGTGG |
| | | GACTTTAAGCTGCCACTGGCAAGCGAGGGAAAGCGGGATAGCCTGGAGGAG |
| | | TACAAAGCCCTGTACGAGGTTAGCAAGAGATCCGAAGCCGACGAGGCCGCC |
| | | TTCAAAGAGGTGAAGGATAACCTGAGGAGTATCATTGCCAAGAGACTGACT |
| | | AGCGGCAAGGCTTACGAGACTATCTTCAAGAAGGAGCTGATCAGAGAGGAC |
| | | CTTATTAATTCTCTGGAGGATGAGGTGGAGAGAGAAATTGTGTCCCAGTTCG |
| | | CCGACTTTACCACCTACTTCGGCGGCTTCCATGAGAATAGAAAGAACATGTA |
| | | CGATGCCGGAGAAAAATCTACCGCCATCGCCTACCGCCTGATCCATCAGAAC |
| | | CTCCCTAAGTTTATGGATAACATGAAGGCTTTCGCCAAAATTGCCGAGACAT |
| | | CCATCGCCGAACACTTCGCAGACATCTATGAGGGCAGCAAGGAGATGCTGA |
| | | ACGTCGGGAGCATCGAGGAAATCTTTAGACTGGATTACTTCTCAGAGATCCT |
| | | GACTCAGCCTCACATCGAGGTGTACAATAGCATTATCGGAAAAAGGGTGCTG |
| | | GAGGATGGAACTGAGATTAAGGGAATTAACGAGTATGTGAACCTGTACAAC |
| | | CAGCAGCAGAAGGATAAGAGACTGCCACTGCTCGTGCCCCTGTATAAGCAG |
| | | ATCCTGAGCGACAGAGAGAAGCTGTCCTGGCTGGCCGAAGAGTTTGACTGTG |
| | | ATGAAAAGATGCTGGCAGCCATCAACGAAACCTACGCCCATCTGCACGACCT |
| | | GCTGATGGGGAACGAGAATGAGAGCCTGAGATCACTGCTGCTGCACCTCCGG |
| | | GACTACGACCTGGAGCAGATCAACATATCAAACGACCTGTCTCTGACAGACA |
| | | TATCTCAGCATCTGTTTGGCCGGTACGATGTGTTCACAAATGGCATCAAGGA |
| | | GGAGCTGAGAGTGATCACACCCAGAAAGAGGAAAGAGACTGACGAACAGCT |
| | | GGAGGACAGGATTAGCAAGATCTTCAAGACACAGAAAAGTTTCTGCATTGCC |
| | | TTCCTCAACTCCCTGCCCCAGCCAGCCATGGAAGATGGCAAGGCCCGCTGTA |
| | | TTGAGGACTATTTTATGGCCCTGGGCGCCGTGAACAACGAAACCACTCAGAA |
| | | AGAGAACCTGTTCGCCCAGATCGAAAACGCCTATGAGAACGCCAAGTCCGTG |
| | | CTGCAGATGAAGGAAACCGGCGACATGCTGAGCCAGAACAAACCCGCCGTG |
| | | GCCAAGATCAAGGCCCTGCTGGACGCTCTGAAGGACCTGCAGCACTTCATTA |
| | | AACCCCTGCTGGGCTCCGGAGAGGAGAACGAGAAGGATGAGCTGTTTTATG |
| | | GCTCTTTTCAGATGATGTGGGATGAGTTGGACGCCGTGACCTCACTGTACAA |
| | | CAAAGTGCGTAACTGGCTGACCAGAAAGCCATACAGCACAGAGAAGATCAA |
| | | ACTGAATTTCGATAACGCCCAGCTGCTGGACGGATGGGACGAGAATAAGGA |
| | | AACCACCAACGCCTCCATCCTGCTGTACAAGGACGGAAACTACTACCTGGGG |
| | | ATCATCAAGAAGGAGGATAGAAAGATTCTGGGCAGCCCTATGCCTACAGAC |
| | | GGGGAGTGCTATGATAAGGTGGTCTACAAGTTTTTTAAAGACATCACCACCA |
| | | TGGTCCCCAAGTGTACAACCCAGAAGAAGGACGTGATCGCTCACTTCATGCA |
| | | CTCTGATGATGATTACATTCTGTATGACAAGAAAACCTTCGATGCCCCAGTG |
| | | ACCATCACCAAGGAGATCTATAACCTGAACAACGTGCTGTACAACGGGGTGA |
| | | AAAAGTTTCAGATTGAGTACCTGCGGTCCACTGGAGACAAGAGGGGCTACG |
| | | AACACGCCGTGTTCATCTGGAAGTCTTTCTGCATGCACTTCCTGAAGGCCTAG |
| | | AAGAGCACAAGTATCTACAACCTGGTGCTGGTGGAGCAGCAGATCAACTCCT |
| | | ATTACGATCTGTCTAGCTTTTATAATGCTGTGAATCTTCTGCTGTACAACCTG |
| | | TCCTACCGGAAAGTGAGCGTGAATTACATTCACAGCCTGGTGGACGAGGGCA |
| | | AGCTGTACCTGTTTAGGATCTGGAATAAAGACTTCAGCGAGTACAGCAAGGG |
| | | GACCCCCAACCTGCATACACTGTACTGGAAAATGCTGTTCGACGAGCGGAAC |
| | | CTGGCAGATGTTGTGTATAAGCTCAACGGCCAGGCCGAGGTGTTCTATAGAA |
| | | AGAGTTCTATCCAGCCTGAGCATCGGATCGTGCATCCAGCCGGCAAACCCAT |
| | | CGCAAACAAGAACGAGCACAGCAAAGAGCCAACCAGCACTTTCAAGTATGA |
| | | CATCGTGAAGGACCGCAGATACACCGTGGACAAATTCCAGTTTCATGTCCCT |
| | | ATCACCATCAACTTTAAGGCAGCCGGGCAGGAGAACATCAACCCCGTGGTGC |
| | | TGGACGCTATTAGGCGGGGAGGCTTCACCCACATTATTGGCATTGACCGGGG |
| | | AGAGAGGCATCTGCTGTACCTGAGTCTTATCGACCTGCAGGGAAACATCGTG |
| | | GAGCAGATGACCCTCAACGAGATCATCAACGAATATAAAGGCCTGAAACAC |
| | | AAGACTAACTATCATGACCTGCTGGCCAAGAGGGAGGGCGAGAGAACAGAG |
| | | GCCCGAAGGTCATGGGACACCATCGAGAATATCAAAGAAATGAAAGAGGGC |
| | | TACCTGAGCCAGGTGGTGCATATCATCAGCAAGATGATGGTGGAGTACAACG |
| | | CTATTGTGGTGCTCGAAGATCTGAACACTGGATTCATGAGAAGCAGACAGAA |
| | | GATTGAGAGGCAGGTGTACGAGAAGTTCGAGAAGATGCTGATCGATAAGCT |
| | | GAACTGTTACATCGACAAACAGGTGGGCGCTAGCGATATCGCCGGCCTGCTG |
| | | CACCCACTGCAGCTGGCTTGCGAAGCAAAAAAATGGAAGAGAAGCCACCAG |
| | | TGCGGGTGCCTGTTCTACATCCCTGCCTGGAACACCTCCAAGATTGATCCCGT |
| | | GACAGGCTTCGTGAACCTGTTTGACACTAGGTACGAGAACGCCGCCAAGGCC |
| | | AAAGCCTTCTTCGGCAAATTCGGTTCCATCAGATACAATGCCGAGAAGGATT |
| | | GGTTTGAGTTTGCCTTCGACTACAATGACTTCACCACCAAGGCCGAGGGGAC |
| | | ACGGACCGAGTGGACACTGTGCACTTACCGGGAGCGGATTAGAACCTTCCGG |
| | | AACCCCCAGAAAAATCATCAGTGGGACGATGAAGAGATCGTGCTGACCGAC |
| | | GCCTTCAAGCAGCTGTTCGATAAGTACGACATCGACATGAAGGGCAATCTGA |
| | | AGGAGGCCATATGCGCCCAGAATGACGTGCAGTTCTTCAAGGACATGATGGA |
| | | ACTGATGAAGCTCCTGCTGCAGATGAGGAATAGCATAACTAACAGCGAGAC |
| | | CGATTACCTGCTGTCTCCAGTGGCCGACGAGAAGGGCCAGTTTTTTGACTCCC |
| | | GCCGGGGCATAACCACACTGCCCGATAACGCCGACGCCAACGGGGCCTATA |
| | | ATATTGCCCGGAAGGGCCTGTGGGTGATCAGGAAAATCCAGGAAACCGCTG |
| | | AGAATGAGAAGCCCAGTCTGGCTATAACAAACAAGGAGTGGCTGCAGTTTG |
| | | CCCAGACAAAGCCCTATCTGAATGAGTAG |
| 183 | 143 | ATGAAACAGTTTACAAATCTGTATCCAGTGAGTAAAACACTGCGGTTCGAGC |
| | | TGCAGCCCATCGGTAAGACCAAGGAGAACATCGAGAAGAATGGCATACTGA |
| | | CCCGCGACGAAAAACGCGCCAAGGACTACCAGGTCGTGAAGGGATTCATCG |
| | | ACGAGTATCACAAACAGTATATCAAGGACCGGCTGTGGAATTTCAAGCTGCC |
| | | TCTGGCTTCTGAGGGCAATCTGGACTCTCTTGAAGAGTACCAGATGCTCTAG |
| | | GAGATGCCACGCAGGGATGATACCCACGAGGAGGATTTCAGTGAGGTGAAG |
| | | GATAACCTGAGGGCCATCATCACCAAGCGACTGACCGAGAACGGTTCAGCAT |
| | | ACGACAGAATCTTTAAGAAGGAGCTGATCCGCGAAGATTTGATCGAGTTOCT |
| | | GAACAATGAGGAAGATAAGGCCCTGGTGAGACAGTTCGCCGACTTTACAAC |
| | | ATATTTTAGCGGCTTTCACGAAAACAGGAGAAATATGTACTCTGCCGAGGAG |
| | | AAGAGCACCGCCATCGCCTACAGACTGATCCACCAGAACTTGCCAAAGTTCA |
| | | TGGACAACATGAAGGCCTTCGCCAAGATCGCCGAGACATCCGTGGCCGAAC |
| | | ATTTCAGCAACATTTATGAGGGCTGGGAGGAGTACCTGAACGTCGGCAGTAT |
| | | TGAAGAAATTTTCCGGCTGGACTACTTCTCCGAGACTCTGACTCAGCCTCACA |
| | | TCGAGGTCTATAATTACATCATCGGCAAGAAAGTGCTCGAAGACGGAACCGA |
| | | GATCAAGGGGATCAACGAGTACGTGAATCTGTACAACCAGCAGCAGAAGGA |
| | | TAAGAGCAAGAGACTGCCATTCCTGGTCCCTCTGTACAAGCAAATTTTGTCC |
| | | GATAGAGAGAAGCTGTCCTGGCTGGCCGAGGAGTTCGACAGCGATGAGAAG |
| | | ATGCTGGGCGCCATCAATGAGAGCTACACCCACCTGCACGAGCTGCTGATGG |
| | | GCGAAGAGAACGAGTCCCTGCGCAGCCTGCTGCTGCACCTGAAGGAATACG |
| | | ACCTGTCCCAGATAAATATCACTAACGATCTGAGCCTGACAAATATCTCCCA |
| | | GCACCTGTTTGGACGATATGACGTGTACTCCAATGCCATTAAGGAACAGCTG |
| | | AAGATCATCATCCCTAGGAAGAAAAAAGAGACCGACGAAGAGTTTGAGGAT |
| | | AGGATCAGCAAGATCTTCAAGACACAGAAGTCCTTCAGCATCAGCTTTCTGA |
| | | ATAATCTGCCCCACCCCGAGACAGAGAATGGAAAGCCTCGGAGCGTGGAGG |
| | | AATATTTCATTAGCATTGGCACTATCAACACCAAAACCACCCAGAAGGAGAA |
| | | TCTGTTCGCTCAGATCGAGAACGCCTACGAAAACGTGAGAGTGATCCTCCAG |
| | | ATGAAAGACACTGGCAATGCCCTGAGCCAGAATAAACCAGCCGTGACCAAG |
| | | ATCAAGGCCCTGCTCGACGCCTTCAAAGACCTGCAGCACTTCATCAAGCCTT |
| | | TACTGGGCAGCGGCGAAGAGCTGGAGAAGGACGAGCTGTTTTATGGCAGCTT |
| | | TCAGATGATCTGGGATGAGCTGAACACCGTCACCCCTCTGTACAACAAGGTG |
| | | AGGAACTGGCTGACAAGGAAGCCCTACAGTACAGAAAAGATCAAGCTGAAC |
| | | TTCGACAATTCCCAGCTGCTGGGCGGCTGGGACGTGAATAAGGAGCCTGATT |
| | | GTACTGGCATCTTGCTGCGCAAGGACAGCTTCTATTACCTGGGAATCATGGA |
| | | TAAAAAAGCAAATCGGGTGTTCGAAACCGACATCACCCCATCAGAGGGCGA |
| | | CTGCTATGAGAAAATGGTGTACAAACAGCTGGGCCAGATTTCTCAGCAGCTT |
| | | CCTAGAATTGCCTTTTCCAAGACCTGGCAGCAGAAACTGTCCATTCCTGAGG |
| | | ACGTGATCAAGATCAAGAAGAATGAATCCTTTAAGAAAAATAGCGGCGATC |
| | | TCCAGAAGCTGATCAGCTACTACAAATCTTTTATCTCCCAGCACGACGAATG |
| | | GAATAGCTATTTCGATATCAATTTCACCGATAGGAATGATTACAAGAACCTG |
| | | CCTGACTTTTATAGCGAGGTGGATAGCCAGTTTTACTOCCTGAGCTTCTCAAG |
| | | GGTGCCTAGCAGCTATATCAATCAGTTGGTCGACGAGGGAAAGCTGTACCTG |
| | | TTTCGCATCTGGAATAAGGACTTCAGCGAGTACTCCAAGGGCACCCCAAACC |
| | | TGCATACCTTGTATTGGAAGATGCTGTTTGACGAGCGGAACCTGAGTAACGT |
| | | GGTGTACAAGCTGAACGGACAGGCCGAAGTGTTCTATCGGAAGGCCAGCATT |
| | | CAGCCCGAGAATAGAATCATCCACAAGGCCAACCTGTCTATCGTGAATAAAA |
| | | ATGAGCTGAACAAGAAGAGGACCTCCACTTTCGAGTACGACATCATTAAGGA |
| | | TCGCCGCTACACCGTGGACAAGTTCCAGTTTCACGTGCCTATCACTATCAACT |
| | | TCAAGGGCACAGGCCAGCTGAACATAAACCCTATTGTCCAGGAAACCATCAG |
| | | ACAGGGAGGGTTCACCCACATCATCGGAATCGACAGAGGCGAAAGGCATCT |
| | | CCTGTACCTGTCCCTGATTGACCTGAATGGCAATATCGTGAAGCAGATGACG |
| | | CTGAACGACATCTTCAACGAGTATAAAGGCCAGACCTATAAAACAAACTATC |
| | | ACGATCTGCTGGTGAAACGGGAGGGCGATCGCACCGATGCCCGCCGGTCTTG |
| | | GGACACCATTGAGACCATTAAGGAGCTGAAAGAGGGCTATCTGTCTCAGGTG |
| | | GTGCACGTGATCTCAAAGATGATGGTGGAATACAAGGCCATCGTGGTGCTCG |
| | | AAGATCTGAATACCGGCTTTATGCGCGGCAGACAGAAAATTGAGCGGCAGG |
| | | TCTACGAAAAATTCGAGAAGATGCTGATCGAGAAGCTGAACTGTTACATCGA |
| | | CAAACAGGCCGACGCCACCGAGGTGACAGGCCTGCTGCACCCACTGCAGCT |
| | | GACATGCGAAGCCAAAAAGTGGAAGCGCTCCCACCAGTGCGGCTGCCTGTTC |
| | | TACATTCCTGCCTGGAACACTTCTAAGATCGATCCCGTCACAGGGTTCGTGA |
| | | ACCTTCTGGACACCCGGTACGACACTAGAGAGAAGGCCAGGCTGTTCTTCTC |
| | | CAAGTTCCAGAGGATTAGCTTCAATACAGAGAAGGGCTGGTTCGAGTTTACC |
| | | TTTGACTACAATGATTTCACCACTAAGGCTGAGGGCACTAGAACCCAGTGGA |
| | | CCCTGTGCACCCACGGGGAGAGAATCAGAACATTCCGGAACCCCCAGAAGA |
| | | ATAATCAGTGGGATAATGAGAGAATCGTGCTGACCGACGAGTTCAAGAAGC |
| | | TGTTCGACCAGAAAGAAATCGATATTTCTGGCAATATGAAGGAGGCCATTTG |
| | | CAACCAGAAGGACGCCCAGTTCTATCGCGACCTGCTGGGCCTGATGAAGCTG |
| | | CTGCTGCAGATGCGGAATAGCATCGCCAATTCTGAGGAGGATTACCTGCTGT |
| | | CCCCCATCGCCGACAAAAATGGGCATTTCTTCGACAGCCGCGAGCGGATCTC |
| | | CAGCCTGCCCGTGGACGCCGACGCAAATGGTGCCTACAACATCGCCAGGAA |
| | | GGGACTGTGGATTGTGCGGAAGATCAGAAACACCTCTGAGGGCGAGAAACT |
| | | GTCCCTGGCAATCACTAACAAGGAGTGGCTGCTGTTCGCACAGTCCAAGCCC |
| | | TATCTGAATGATTGA |
| 184 | 144 | ATGAAGAAACTGACAAACCTGTACCCCGTGAGCAAAACCCTGAGGTTCGAA |
| | | CTCCAGGCTATCGGCAAGACCAAGGAGAATATCGAAAAGAATGGAATTCTG |
| | | CAGAGAGATGAGAAGCGCGCCGAGGACTACAAGATCGTGAAGTCCCTGATC |
| | | GATGAATACCACAAACAGTTCATTAAGGATCGCTTGTGGAACTTTAAGCTGC |
| | | CATTGCACAACGAGGGCCACCTGGACTCCCTGGAGGAGTATCAGGCACTGTA |
| | | CGAGATTTCCAAGCGGAACGACACCCAGGAAGCCGAATTCACTGAGATCAA |
| | | AGACAACCTTAGGTCAATTATCAGCAAGCGACTGACCGAGTGTGGCTCTGCC |
| | | TACGAGCGGATCTTCAAAAAGGAACTGATCAGGGAGGACCTGATCGATTTCC |
| | | TGGAAAGCAACGAGGATAAGGACATCGTGAGACAATTTGCTGATTTCACCAC |
| | | CTATTTCAGCGGGTTTCACGAGAATAGGAGAAACATGTACGTGGCCGAGGAG |
| | | AAGTCCACCGCCATCGCCTATAGGCTGATCCACCAGAACCTGCCCAAATTTA |
| | | TGGACAACATGAAAGCCTTCGCCAAGATCGCCGAGACCTCCGTGGCCGAGCA |
| | | CTTCACCGACATCTACGAGGGCTGGAAAGAATTCCTGAACGTGGGCAGCCTG |
| | | GAGGAAATATTTAGGCTCGACTATTTCTCCGAGACACTGACACAGCCCCATA |
| | | TCGAAGTGTACAATTACATTATCGGCAAGAAGATCCTGGAGGATGGCGCCGA |
| | | AATTAAGGGCATCAATGAGTACGTGAATCTGTATAACCAGCAGCAGAAAGA |
| | | CAAGAGCAAAAGACTGCCATTCCTGGTGCCCCTCTACAAGCAGATCCTGTCA |
| | | GACCGCGACAAACTGTCCTGGCTGGCTGACGAATTCGACTOCGACGAGAAGA |
| | | TGCTGGCCGCAATCAATGAGTCATACAATCACCTGCACGACCTGCTGATGGG |
| | | CCTGGAGAATGAGTCTCTGAGGTCCCTGCTCCTGAACATCAAAGACTTTAAT |
| | | CTGTCCCAGATTAATATCTCCAACGACCTGAGCCTGACTGATATCTCTCAGCA |
| | | CCTGTTCGGACGCTACGATGTGTTTACATCAGGCATTAAAGACGAGCTGCGG |
| | | ATTATCACACCTCGCAAAAAGAAGGAGAGCGATGAGGAGTTCGAAGACCGC |
| | | ATCTCCAAAATCTTTAAAACTCAGAAGTCCTTTAGCGTGGACTTTCTGGACAA |
| | | GCTGCCACAGCCTGTCATGGAAGACGAAAAACCCAGAACCATCGAGGATTA |
| | | TTTTATGACCCTGGGCGCCGTGAATACTGAGGCCACACAGAAGGAAAACTTT |
| | | TTCGCCCAGATAGAGAACGCCTACGAGGATGCCCGCACCATCCTCCAAATTA |
| | | AGGACACCGGAGACACCCTGAGCCAGAATAAAAGTGCCGTGGCCAAAATTA |
| | | AAGCCCTGCTGGATGCACTGAAGGATCTCCAGCACTTCATTAAACCTCTGCT |
| | | GGGGTCTGGCGAGGAAAACGAGAAGGACGAGTTGTTTTACGGAAGCTTCCA |
| | | GATGATGTGGGATGAGCTGGACACCGTCACAAGCCTGTACAATAAGGTGAG |
| | | GAACTGGCTGACACGGAAGCCTTTCTCCACTGAGAAGATCAAACTGAACTTC |
| | | GACAACAGTCAACTGCTGGGCGGATGGGACGTGAATAAGGAGCCCGACTGT |
| | | AAAGGTATCCTGCTGAGAAAGGACGACTTCTATTATCTGGGCATCATGGACA |
| | | AGAAAAGCAATAGAATCTTTGAGGCCGATGTGACACCCACCGATGGCGAGT |
| | | GCTACGACAAGATCGACTATAAGCTGCTGCCCGGCGCTAATAAAATGCTGCC |
| | | AAAGGTGTTCTTCTCAAAGTCTAGGATCGACGAGTTCGCCCCATCCGAAGCT |
| | | ATCGTGAGCTCCTACAAGAGAGGCACCCACAAGAAAGGCGCCGTGTTCAAC |
| | | CTCGCAGATTGCCACCGGCTGATTGACTTCTTTAAGCAGAGCATCAATAAGC |
| | | ACGAGGATTGGAGCAAGTTTGGATTCCATTTTTCTGATACCAAATCTTACGA |
| | | GGACATCAGCGGCTTTTACAGAGAGGTGGAACAGCAGGGCTACATGCTGTCA |
| | | TCTCATCCCGTGTCCTCCTCCTACATTGACACACTGGTGAGCGAGGGCAAGTT |
| | | GTACCTGTTCAGGATCTGGAACAAGGACTTCTCTGAATCTAGTAAGGGCACT |
| | | CCCAACCTGCACACACTGTACTGGAAGATGCTGTTCGATGAGAGAAATCTGG |
| | | TGGACGTCGTGTACAAGCTGAACGGTCAGGCCGAAGTGTTTTATCGCAAAGC |
| | | CAGCATAAAGCCTGAGAATTGCATCATTCACAAGGCCAACCAGCCTATCGCT |
| | | AACAAGAACGAGCTGAACACCAAGGGGGCCTCCACCTTCAAGTACGACATC |
| | | ATTAAGGACAAAAGGTACACAGTGGATAAGTTCCAGTTTCATGTCCCCATCA |
| | | CCATTAACTTCAAGGCTGCCGGCCAGAACAACATCAACCCCATCGTGCAGGA |
| | | GGCCATCAAGCAGGACGAGTTCTOCCACATTATTGGCATTGATAGAGGCGAA |
| | | AGGCACCTGCTGTACCTGAGCCTGATCGATCTGAAAGGCAACATCGTGAAGG |
| | | AGATGACCCTGAATGAGATTATCAATGAGTACAAGGGCCAGACCTATAAAA |
| | | CAAACTATCACGACCTGCTGGCCAAAAGAGAGGGAGACAGAACCGAGGCCC |
| | | GCAGGTCTTGGGAGACCATCGAAACAATTAAGGAGCTGAAGGAGGGCTACC |
| | | TGAGCCAGGTGGTGCATATCATCTCTAAGATGATGGTGGAGTACAACGCAAT |
| | | CGTGGTGCTGGAAGACCTGAACACCGGGTTCATGCGGGGAAGGCAGAAGAT |
| | | CGAGAGACAGGTGTACGAGAAGTTTGAGAAGATGCTGATCGATAAACTGAA |
| | | TTGCTACATCGACAAGCAGTTATCTCCAACAGATGAGGGCGGCCTGCTGCAT |
| | | CCACTGCAGCTGACCTGTGACGCTCAGAAGTGGAAGAGAAGCCACCAGTGC |
| | | GGCTGTCTGTTCTACATCCCTGCCTGGAATACCTCTAAGATCGATCCCGTGAC |
| | | AGGCTTCGTGAACCTGCTGGATACCCACTACGACACCAGAGAGAAGGCTAG |
| | | AGTGTTCTTCTCCAAATTCCAGAGGATCAGCTACAATGCTCCCAAGGGCTGG |
| | | TTCGAGTTCGCTTTTGACTACAACGATTTCACAACAAAAGCCAAGGGGACCC |
| | | GCACTCAGTGGACACTGTGCACCCAGGGCGAGCGCATTAGGACCTTCCGGAA |
| | | CCCCCAGAAGAATCATCAGTGGGACGACGAGAGGATCATGCTGACCGATGC |
| | | CTATAAACAGCTGTTTGACAAGTACGACATCGACATCAACGGTAACATCAAG |
| | | GAAGCCATTAGCAGTCAGACAGACGCCCAGTTCTTCAAAGACCTGATGGGGC |
| | | TGATGAAGCTGCTGCTGCAGATGCGCAATTCCATCACAAACAGCGAGGAGG |
| | | ACTATCTGCTGTCCCCTGTGGCCAATGGAACAGGACATTTCTTTGATAGCAG |
| | | GGAAGGCATTTCTTCTCTGCCTAAGGACGCCGACGCGAACGGCGCATATAAC |
| | | ATCGCCCGCAAGGGGCTGTGGGTGGTGCAGAAGATCCAGGAGACCCCTGAG |
| | | GGCGAGAAGCCTAGCCTGACTATCACCAACAAAGAATGGCTGCAGTTTGCCC |
| | | AGACAAAGCCTTACCTGAACGACTAA |
| 185 | 145 | ATGAAGGAGAAGGAGCAGTACTCCGATTTTAGCCGTCTCTATCCCGTGTCTA |
| | | AGACCCTGAGATTCGAGCTGAAACCCATCGGAAGAACCATGAAGAATATTG |
| | | AAAAGAACGGTATACTGGAGCGGGACAATCAGAGGGCCAACGATTACAAAA |
| | | TCGTGAAGGAATTTATTGACGAGTACCACAAACAGCACATTAAGGACAGACT |
| | | GTGGGATTTCAAACTCCCCCTGAAGAGCGATGGCAGGCTGGACAGCCTGAAG |
| | | GAGTATCAGGAGCTGTATGAGCTGTCTAAGCGGGACGCCAATCAGGAGTCA |
| | | GCCTTTACCGAAATCAAGGATAACCTGAGAAGCATCATCGCCCGGAGACTGA |
| | | CCCACGATTCCCCTGCCTACAAGAGAATTGATAAGAAGGAGCTGATCAGAGA |
| | | GGACCTGCTGGAGTTCCTGGAGAACGAGGAAGATAAGGAGATCGTGAGACA |
| | | GTTTGCCGATTTTACCACTTATTTCACCGGGTTCCACCAGAACAGGCAGAATA |
| | | TGTATACAGCAGAGGAAAAGAGCACCGCCATCGCCTACCGCCTGATCCACCA |
| | | GAACCTGCCAAAGTTCATGGACAACATGAAGGCTTTTGCCAAAATCGCCGAG |
| | | ACTAGCGTGGCTGAGCATTTCGCCGATATCTACGAAGGATGGAAGGAGTACC |
| | | TGAACGTGGGCAGTATCGAAAAGATCTTCCAGCTGGATTACTTCAGTGAGAC |
| | | AATGACTCAGCCACATATCGAAGTGTACAACTACATTATCGGCAAGAAGATC |
| | | CTGGAGGACGGGACAGAAATTAAGGGGATCAATGAGTACGTGAATCTGTAC |
| | | AATCAACAGCAGAAGGATAAGTCACAGCGCCTCCCGTTCCTGGTGCCCCTGT |
| | | ACAAGCAGATCCTGTCTGACCGCGAGAAGCTGTCCTGGATGGCCGAGGAGTT |
| | | CGACAGCGATGAGAAAATGTTGGCCGCCATCAACGAATCTTACGTGCATCTG |
| | | CACGATCTGCTGATGGGCACCGAAAACGAGAGCCTGAGAAGCCTCCTGTCCC |
| | | ACATGAAGGATTTCAATCTGGAGCAGATCAACATCAACAACGACCTGAGCCT |
| | | GACCGACATCTCACAGCACCTGTTCGGCCGCTACGATGTCTTCACTAACGGG |
| | | ATTAAGGATGAGCTGCGGGCCATTACTCCACGGAAGAAGAAAGAGTCTGAC |
| | | GAGGACTTTGAGGATAGAATCAGCAAGATCTTTAAAACGCAGAAATCCTTTT |
| | | CAATCAGTCTGCTGAATAAGCTGCCTCAGCCTGTGATGGAAGACGGCAAGCC |
| | | CAGGACAGTGGAGGAGTATTTCATGAGCCTGGGCGCCGTGAACACCGAGAC |
| | | AACCCAGAAGGAAAACCTGTTCGCCCAGATCGAGAACGCCTACGAGAACGO |
| | | CCGGAGCATCCTGCAGATGAAGGACACCGGCGATGCCCTGAGCCAGAATAA |
| | | ACAGGCCGTGGCCAAGATAAAGGCCCTGCTGGATGCCTTCAAAGACCTGCAG |
| | | CACTTCATTAAACCTCTGCTGGGCTCAGGGGAGGAGAACGAGAAGGATGAG |
| | | CTGTTTTACGGCGTGTTCCAGCTGATTTGGGACGAACTGGATACAATGACAC |
| | | CCCTGTACAATAAAGTGAGGAATTGGCTCACCCGCAAACCTTACTCAACCGA |
| | | GAAGATTAAACTTAATTTTGACAACGCACAGCTGCTGGGCGGGTGGGATGTG |
| | | AACAAAGAGCCCGATTGCACTGGCGTGCTGCTGCAGAAAGACGGCTTCTATT |
| | | ACCTGGGGATCATGAACAAGAAGGCCAACCGGATCTTTGAGTCTAAGGTGAG |
| | | CCCCAGCAATGAGGATTGCTATGAGAAAATTGATTACAAGCTGCTTCCAGGT |
| | | GCCAATAAGATGCTGCCCAAGGTTTTTTTCTCCAAGTCCAGGATTGACGAGTT |
| | | TGCTCCTTCCGAGGCCATTGTGGATAGCTACAGACGCGGAACACACAAAAAG |
| | | GGCCCCGACTTCAATCTTAGCGACTGTCACAGACTGATCGACTTCTTTAAGG |
| | | ATAGCATTGCCAAGCACGAGGATTGGTCCAAGTTCGTGTTTCATTTCTCCGAG |
| | | ACCAGCACTTACGAGGACATCTCCGGCTTTTATCGCGAAGTCGAGCAGCAGG |
| | | GCTACATGCTGGCTAGTCACCCAGTGTCAGTCAGTTATGTGGAACAGATGGT |
| | | GGATGAGGGAAAGCTGTACCTCTTCAGAATCTGGAACAAGGACTTCTCCGAG |
| | | CATTCAAAGGGCACCCCCAACCTGCACACCCTGTACTGGAAGATGCTGTTCG |
| | | ACGAGAGAAATCTGGCCGACGTGGTGTACAAGCTGAATGGGCAGGCTGAGG |
| | | TGTTTTACAGAAGAGCTTCCATCAAGCCCAAGAACCGGATCATTCACCAGGC |
| | | CAACAGCCCCATCGCCAACAAGAACGAACTGAACGAGAAGCGCACCTCCAC |
| | | CTTTAAGTATGATATTATTAAAGACAGACGGTACACCGTGGATAAGTTTCAG |
| | | TTTCATGTGCCCATCACAATCGGATTTAAGGCCATCGGGCAGAACAATATCA |
| | | ATCCCATCGTGCAGGACACCATACGGCAGGGCGGGTTCACTCATATCATCGG |
| | | AATCGACAGGGGCGAACGCCACCTGCTGTACCTGAGCCTGATCGACCTGAAG |
| | | GGCAACATCATCAAGCAGATGACCCTGAATGATATTGTCAACGAGTATAATG |
| | | GCGTGCTGTACAAGACCAACTACCGGGACCTGCTGAAGAAAAGGGAGGGCG |
| | | AACGGACAGATGCACGCAGAAGCTGGGAGACTATTGAAACCATCAAGGAGC |
| | | TGAAGGAAGGCTACCTGTCCCAGGTGGTGCACATTATCTCCAAGATGATGGT |
| | | CGAGTACAACGCCATTATTGTGCTGGAGGACCTGAACACCGGATTTATGAGG |
| | | GGCAGGCAGAAAATTGAGCGGCAGGTGTACGAAAAGTTTGAGAAGATGCTG |
| | | ATTGACAAGCTGAATTGTTACATCGACAAGCAGACAAACCCCGAAGACGTG |
| | | GGCGGCCTGCTGCACCCACTGCAGCTCACATGCGATGCACAGAAGTGGAAG |
| | | AGGAGCCACCAGTGTGGCTGTCTGTTTTACATCCCCGCCTGGAACACCTCCA |
| | | AAATCGACCCCGTCACCGGCTTCGTGAATCTGTTCGACACTAGGTACGAGAC |
| | | ACGAGAGAAGGCCCGGCTGTTTTTCTCCAAGTTCCAGCGCATCGACTTCAAC |
| | | ACCGAGAGCGACTGGTTCGAGTTTTCCTTTGACTACAATGACTTCACAACCA |
| | | AAGCAGAAGGCACCCGGACTAAGTGGACCCTTTGCACTTACGGAGAGCGGA |
| | | TCAGAACCTTCAGGAATCCTGAGAAGAATCATCAGTGGGACGACGAAAGGA |
| | | TCGTGCTGACCGATGAGTTCACCCAGCTGTTCGAGCGCTATAACATCGATAT |
| | | CCAGGGCAACCTGAAAGAGGCTATTTCTGCCCAGTCTGACGCACAGTTTTAC |
| | | CGGGAACTCCTGGGGCTGATGAAGCTGCTGCTGCAGATGCGCAACTCAATCA |
| | | CCAATAGCGAGGAGGATTACCTGCTGTCCCCCGTGGCAGACGAATCTTCCCA |
| | | TTTTTTTGATTCCCGGGAGAACGTGGAGATCCTGCCCAACAATGCTGACGCT |
| | | AACGGCGCCTATAATATCGCCCGCAAGGGCCTGTGGGTGATCAGGCGGATTC |
| | | AGGAAACCGCTGAGAACGAGAAAATCAGCCTGGCCATCTCCAACAAGGAGT |
| | | GGCTGCAGTTCGCCCAGACTCAGCCCTACCTGAACGACTGA |
| 186 | 146 | CTCCAGCTGACCGATACAGAGGACAAACTCAGTCAGAATAAACCAGCTGTG |
| | | GGCAAGATTAAGGCCCTGCTGGACGCCTTCAAAGACCTGCAGCACTTCATCA |
| | | AGCCTCTGCTGGGCTCCGGGGAAGAAAATGAGAAGGATGAGCTGTTCTATGG |
| | | CGCCTTCCAGCTGATCTGGGATGAACTGGACACCGTGACCCCTCTGTACAAT |
| | | AAAGTGAGGAACTGGCTGACCAGGAAGCCGTATAGCACCGAGAAAATCAAA |
| | | CTGAACTTTGACAACGCCCAGCTGCTGGGGGGATGGGATGTGAACAAGGAA |
| | | CCGGACTGCACCGGCGTGCTGCTGAGGAAGGACGGGTTCTATTACCTGGGCA |
| | | TCATGAACAAAAAGAGTAATCGCATCTTCGATGCTGACGTGACCCCTGCCGA |
| | | CGGGATTTGCTACGAAAAGATCGATTATAAACTCCTGCCTGGGGCCAACAAG |
| | | ATGCTGCCTAAGGTGTTCTTTTCTAAGAGTCGGATCGATGAATTCGCCCCATC |
| | | CGAGGCCATCCTGAGCAGCTACAAGCGGGGCACACATAAGAAAGGCGCCGA |
| | | CTTCTCCCTGTCCGACTGCCACCGGCTGATCGATTTCTTCAAGGCTTCCATCA |
| | | ACAAACACGAGGACTGGAGTAAGTTTGGCTTCCAATTCTCCGATACCAAGAC |
| | | CTATGAGGACATCAGCGGCTTTTACAGGGAGGTGGAGCAGCAGGGATATAT |
| | | GCTGTCATCCCACCAGGTGAGCGAAGCCTACATCAACCAGATGGTGGAGGA |
| | | GGGCAAGCTCTTTCTGTTCAGGATCTGGAACAAAGATTTCTCCGAGTACAGC |
| | | AAGGGCACCCCAAATATGCACACTCTCTACTGGCGGATGCTGTTCGACGAAC |
| | | GCAATCTGGCCGATGTGGTGTACAAGCTGAATGGACAGGCCGAAGTGTTCTA |
| | | CCGGAAGGCTTCCATTAAGGCCGAGAACCAGATTATGCACCCCGCTCATCAC |
| | | CCCATCGAAAACAAGAATACACTGAACGAGAAGCGAAGTAGCACCTTCGAC |
| | | TACGACCTGGTGAAAGACCGGAGGTACACCGTGGACAAGTTCCAGTTCCACG |
| | | TCCCCATCACCATCAACTTCAAGGCCATCGGCCAGACCAACGTCAATCCCAT |
| | | CGTGCACGAGACCATTAGACGGGGCGGCTTTACTCACGTGATCGGCATCGAT |
| | | CGGGGCGAGAGACACCTTCTGTACCTTAGCCTGATCGATCTGAAGGGCCATA |
| | | TCGTGAAACAGATGACCCTGAACGAGATTATCAACGAGTACAATGGCCTGGC |
| | | CCACAAGACCAACTACTACGACCTGCTGGTGAAGCGAGAGGGTGAGCGAAC |
| | | TACCGCTAGGCGCAGCTGGGACACCATCGAAAACATCAAGGAACTGAAAGA |
| | | GGGCTACCTGAGCCAGGTGATCCACATTATCTCCAAGATGATGGTGGAGTAT |
| | | AACGCCATTGTGGTGCTGGAGGATCTGAACATGGGGTTTATGCGGGGAAGGG |
| | | AGAAGATCGAGAGACAGGTGTACGAGAAGTTTGAGAAGATGCTGATTGATA |
| | | AACTGAACTGCTACATCGATAAGCAGGCCGACAGTCAGTCTGAGGGCGGCCT |
| | | GCTGCACCCCATCCAGCTGGCCAATAAGTTCGAGAGCTTCAGGAAGCTGGGT |
| | | AAGCAGAGCGGCTGCCTGTTTTATATCCCTGCATGGAACACCAGCAAGATCG |
| | | ATCCAGTGACCGGCTTTGTCAACCTGTTCGATACCCGGTACGAAACTAGGGA |
| | | AAAGGCCAAGCTCTTTTTCAGCCATTTCCAGCGTATCTGCTTTAATGCTGAGA |
| | | AGGACTGGTTTGAATTCAGTTTTGATTACAACGACTTCACTACCAAAGCCGA |
| | | GGGCACCAGGACCCAGTGGACACTGTGCTCTTATGGCACCAGAATCAGAAAT |
| | | TTCCGCAATCCTCTGCAGAATCATCAGTGGGACGATGAAGAGATTGTGCTGA |
| | | CCGAGGCCTTCAAGGCTCTGTTCGACAAGTACGACATCGACATCCATGCCAA |
| | | TCTGAAGGAAGCCATTAACGCCCAGACCGATGCTCAGTTCTTCAAGGATCTG |
| | | ATGGGCCTGATGAAGCTGCTGCTGCAGATGAGGAACTCCAAAACTAACAGC |
| | | GAGGTGGACTATCTGCTGAGCCCTGTGGCTGATGAGCACGGCCGCTTCTTCG |
| | | ATAGTAGAGCCGGCGCCGGCTCTCTGCCTGACAACGCCGATGCCAATGGCGC |
| | | CTACAACATCGCCAGAAAGGGACTGTGGGTGATCCGGAAGATCCAAGAGAC |
| | | CCCCGAGGGCGAGAAGCTGAGTCTGGCCATCACCAACAAGGAATGGCTGGA |
| | | GTTCGCCCAGACAAAGCCCTACCTGAATGACTAG |
| 187 | 147 | CTGGGCCTGTTCCTGAGACTCCGGCCAAAGCTGTTCGTGATCCTGTGCAAGA |
| | | GCAACTCAAACGTGATGAGGAACCTGACCAACCTGTACCCCGTGTCTAAGAC |
| | | TCTGCGGTTTGAACTGCAGCCCATCGGGAAAACCAAAGAGAACATCGAGAA |
| | | GAATGGAATCCTGCAGAGGGACGAAAAGCGGGCCGAGGACTACCAGAAGGT |
| | | CAAGAACCTGATCGACGAGTACCACAAGCAGTTCATCAAGGACAGACTGTG |
| | | GACCTTCGAGCTCCCCCTGGAGATTCTGGAGGAGTACAAAGAACTGTATGAG |
| | | ACCCCTAAGCGAGACGAAGCCGCCTTTACCGAGGTGAAGGATAACCTGCGG |
| | | GCCCTGATCGCCTCCCAGCTGAAGGCCAAGGGAAGTATCTATGACCGCATCT |
| | | TCAAGAAAGAGCTGATCAGAGAAGACCTGATCGAGTTCCTGGATAACGAGG |
| | | AGGATAAGGAGATCGTGAGACAGTTTGCCGACTTTACCACTTACTTCAGTGG |
| | | CTTTCACAAGAACCGGGAGAACATGTACTCCGCAGAGGAGAAGAGCACCGC |
| | | TATCGCATACAGACTGATCCACCAGAATCTGCCCAAGTTTATGGACAACATG |
| | | AAGGCCTTCGCCCTGATTGCTAAATCCCCCGTCGCCGAGCACTTCCCCGATCT |
| | | GTACTCAGCCTGGGAGGAGTGCCTGAACGTGGCATCCATCGAGGAAATGTTT |
| | | CGCCTGGACTATTTCTCCCAGACACTGACCCAGACCGGCATCGAAGTGTATA |
| | | ACTATATCATCGGCAAAAAAATTCTGGAGGATGGCACAGAGATCAAGGGAA |
| | | TTAACGAGTACGTCAATCTGTACAATCAGCAGCAGAAGGACAAGAAGGAAA |
| | | GACTGCCCCTGCTGGTCCCACTTTATAAACAGATCCTGTCTGATCGCGAGAA |
| | | ACTGTCTTGGTTGGCAGAGGAGTTTGACTCCGATGAAAAGATGCTGAACGCA |
| | | ATTAATGAGCTGTATGCCCACCTTCATGACCTGCTGATGGGCGAAGAGAACG |
| | | AGTCTCTGCACTCTATTCTCCTGCAGCTGAAAGAATACGACCTGTCTCAGATT |
| | | AACATTGCCAACGATCTGTCTCTGACAGCCATTAGTCAGCAGATGTTCGGCA |
| | | GATATGACGTGTTTACCAACGGAATGAAAGATATTCTCAGGACCATCACTCC |
| | | TCACAAGAAGAAGGAGACCGAGGAAGATTTCGAGGAGAGGATCAGCAAAAT |
| | | CCTGAAGATCCAGAAGTCTATCTCTATCGCAGAACTGAACAAGCTGCCTCAG |
| | | CCCATTAGCGAGGATGGCGGGAAACCCAAACTGGTGGAAGATTATTTCATGA |
| | | GCCTGGGGGCCGTGGACGACGGCGTAACCCAGAAGGCTAATCTGTTCGCCCA |
| | | GATTGAAAACGCCCACACCGACGCTCTGTCCGTGCTGCAGCTGACAGGTACC |
| | | GGCGACACCCTGTCCCAGAACAAGACAGCCGTGGCCAAGATTAAAACTCTGC |
| | | TGGATGCCTTTAAGGATCTGCAGCACTTCATTAAGCCACTGCTGGGGAGCGG |
| | | CGAGGAGAACGAGAAAGATGAGCTGTTTTACGGCAGCTTCCAGCTGTTTTGG |
| | | GACGAGCTGGACGCTGTGACCCCCCTGTACAATAAGGTGAGAAACTGGCTCA |
| | | CCCGGAAGCCATATTCCACAGAGAAGATCAAGCTCAACTTCGATAATGCCCA |
| | | GCTGCTCGGGGGCTGGGACGTGAACAAGGAGCCAGATTGCACTGGCATCCTG |
| | | CTGAGGAAGGACGGACTGTATTACCTGGGAATCATGAACAAGAAGAGCAAC |
| | | AGAATCTTCGATGCCAGCGTGACCCCTAGTGACGGAGACTGCTATGAGAAAA |
| | | TCGACTACAAACTGCTGCCCGGCGCCAACAAGATGCTGCCCAAGGTGTTTTT |
| | | CAGCAAGTCCAGAATTGACGAGTTTGCCCCCAGCGATGCCATCATCAATTCC |
| | | TATAAGAGAGAGACACACAAGAAAGGCGCCAATTTCTCCCTGAGGGACTGC |
| | | CACAGACTGATCGATTTTTTCAAACAGTCCATCAGCAAGCATGAAGACTGGA |
| | | GTAAGTTCGGCTTCCACTTTTCCGATACATCCAGTTATGAGGACATCTCCGGG |
| | | TTCTATCGGGAAGTGGAGCAGCAGGGCTACATGCTGAGCTCTCACCCTGTGA |
| | | GCAGTGCTTATATCCACCAGATGGTGGATGAGGGGAAACTGTTTTTGTTCAG |
| | | GATTTGGAACAAGGATTTCAGCGAATACTCTAAAGGTACACCCAACTTACAT |
| | | ACCTTGTATTGGAAGATGCTGTTCGACGAAAGAAATCTGGCTGATGTGGTGT |
| | | ACAAACTGAACGGCCAGGCCGAGGTGTTCTACCGGAAAGCCTCTATCAAGCO |
| | | TGAGAATAGAATCATACACCCCGCCAATCAGGACATTAAGAATAAGAATGCT |
| | | CTGAACGAGAAGGCCACTTCTCGGTTTGAATATGACATTGTGAAGGACCGGA |
| | | GATACACCGTGGATAAGTTTCAGTTCCACGTGCCTCTGACCATCAATTTCAAA |
| | | GCCACTGGACAGGCAAATGTGAACCCCGTGGTGCAGGAGGCCATCCGCAAG |
| | | GGCGAGTTCACTCACATTATTGGGATCGACCGCGGCGAGAGACACCTGCTGT |
| | | ATCTGTCTCTGATCGACCTGAAAGGGAGAATCGTGAAGCAGATGACACTCAA |
| | | TGAAATCGTGAACGAGTACAATGGCCACTCTCACACAACAGACTACCATGGA |
| | | CTGCTCGCCGATCGGGAGGGCCAGCGCACCACTGCAAGGAGATCTTGGGATA |
| | | CTATCGAAAACATCAAGGAGCTGAAAGAAGGATATCTGAGCCAGGTGATCC |
| | | ACGTCATCACAAAGATGATGGTGGAATACAAGGCCATCGTGGTGCTGGAAG |
| | | ACCTGAACATGGGGTTTATGAGAGGCAGACAGAAGATCGAAAGGCAGGTGT |
| | | ATGAGAAGTTCGAGAAAATGCTGATCGAGAAACTGAACTGCTATATCGATAA |
| | | GCAGGCCGATCCCACCGATGTGGGCGGCCTGCTGCACGCCCTGCAGCTGACA |
| | | AACAAATTCGAGTCCTTCAAGAAACTGGGCAAGCAGAGCGGCTGCCTGTTCT |
| | | ACATCCCAGCCTGGAATACCAGCAAAATTGACCCAGTGACTGGCTTTGTGAA |
| | | TCTGTTTGATACCAGGTACGAGACAAGGGAGAAGTCCAGACTGTTTTTCTCT |
| | | AGATTCGATAGGATTGCCTATAATCAGGACAAGGACTGGTTTGAGTTCTCAT |
| | | TTGACTATGACAACTTTACTACTAGGGCCGAAGGGTGCAGGACCCACTGGAC |
| | | TCTGTGCACCCAGGGCACAAGAATCAGAAACTTCCGGAACCCACAGAAGAA |
| | | TAACCAGTGGGATGACGAAGAGGTGAACCTGACCGCCCTGTTCAAACAGCTG |
| | | TTCGACCTGTATGACATCGATATCCACGGCAACCTGATGGAGGCCATCCAGA |
| | | GACAGACAGAGGCCAAGTTCTACCAGGAGCTGATGCACTTAATGAAGCTGA |
| | | CCCTGCAGATGAGGAATAGCAGAATCAACTCCGAGGTGGACTACCTGCTGAG |
| | | CCCTGTGGCTGACGAAAAGGGCAGGTTTTTCGATTCCAGATCCGGGGATTGT |
| | | GTGCTCCCCGACAACGCCGACGCCAACGGCGCTTACAACATCGCTAGAAAG |
| | | GGCCTGATGCTGATTCAGACCATCAGAGAAACCCCCGATGGCGAGAAGCCC |
| | | AGCCTGACCATCACCAATAGGGAGTGGCTGCGATTCGCCCAGGAGAAGCCTT |
| | | ACCTGGTCGACTAA |
| 188 | 148 | ATGAAGCAGTTCACTAATCTGTACCCTGTGAGCAAGACACTGAGATTCGAGO |
| | | TGCAGCCCATTGGAAGTACAAAGGAGAACATTGAGAAGAACGGGATTCTGT |
| | | CTAGAGATGAGCAGAGGGCCGAAGACTACAAGAAAGTGAAGAACCTGATTG |
| | | ATAAATACCACAAACAGTTTATCAAAGACCGGCTGTGGAATTTTCAGCTCCC |
| | | ACTGGAGAATAAGGGGAACCTGGACAGTCTGGAGGAGTATCGCATCCTGTA |
| | | CGAGACCCCCAAGAGGGATGAGGCCGTGTTCACTGAGGTGAAGGACAACCT |
| | | GAGGGCTCTGATTGTGAATCAGCTGAAGGCCAAGGGCAGCGCCTATGAGCG |
| | | CATCTTCAAGAAGGAACTGATCCGGGAAGATCTGATTGAGTTTCTGGACATG |
| | | GAGGAGGACAAGAAAACAGTGAGACAGTTCGCTGATTTTACCACCTACTTCA |
| | | CTGGATTCAACGAGAACAGGGCCAATATGTACAGCGCCGAGGAGAAAAGTA |
| | | CTGCTATCGCATACAGACTGATCCATCAGAATCTGCCTAAGTTTATGGACAA |
| | | CATGAAAGCTTTTGCCCAAATCGTGCAGTCACCAGTGGCCGAACACTTTACC |
| | | GACCTGTACTCCTACTGGGAAGAGTACCTCAATGTGGCCTCCATCGAGGAGA |
| | | TGTTTCAGCTGGATTTCTTCAGCCAGACCCTGACCCAGACCGGGATCGAAGT |
| | | GTATAACTACATCATCGGCAAGAAGATTCTGGAGGATGGAACCGAGATCAA |
| | | GGGTATCAACGAGTACGTGAACTATTACAACCAGCACCAGAAGGATAAAAA |
| | | GCAGCGCCTGCCCCTGCTGGTGCCACTGTACAAGCAGATCCTGTCTGACAGA |
| | | GAGCGCCTGTCATGGCTCGCTGAGGAATTCGATTCCGATGAGAAGATGCTGA |
| | | AGGCCATCAACGAGCTGTATGTGCACCTGCACGACCTGCTGATGGGAAAGGA |
| | | GAACGAGTCCCTTAGATCTCTGCTGCTGAAGCTCAAGGAGTATGACCTGAGC |
| | | CAGATCAATATTGCCAATAACTTCTCTCTGACCGCCATCTGCCACCAGATGTT |
| | | CGGCAGATATGACGTGTTCATTAACGGCATGAAGGATATTCTGAGAGCCATT |
| | | ACACCCCACAAAAAGAAGGAGACCGAAGAGGAGTTTGAAGAGAGGATTTCA |
| | | AAGATCCTGAAGACCCAAAAGTCTATCAGTATCGCCGAGCTGAACAAGCTGC |
| | | CACAGCCCGTGTGCGAGGACTGCTGCAAGCCCAAACTGGTTGAGGATTACTT |
| | | CATGTCCCTGGGGGCAGTGGATGATGGCGTGACACAGAAGCTCAACCTGTTC |
| | | GCCCAGATCGAGAACGCCCACACAGATGCTCTGAGCGTGCTGCAGCTGACCG |
| | | GCACAGGAGATACGCTGTCTCAGAATAAGCCCGCCGTGGCCAAGATCAAAA |
| | | ACCTGCTGGACACCTTCAAAAATCTCCAGCATTTTATCCAGCCACTGCTGGGC |
| | | AGCGGCGAGGAGAATGAGAAGGACGAACTCTTCTATGGCTCCTTTCAGCTGT |
| | | TCTGGGACGAGCTGGATGCTGTAACCCCACTGTATAACAAGGTGAGGAACTG |
| | | GCTGACACGGAAGCCTTACTCCACCGAGAAGATTAAACTGAATTTCGACAAT |
| | | GCCCAGCTGTTGGGGGGCTGGGACGTGAACAAAGAGAGCGACTGCACCGGC |
| | | GTGCTGCTTAGAAAAGGGGCCTATTACTATCTGGGAATCATGAACAAAAAGG |
| | | CCAATAGGATTTTCGATGCCTGTATCACCCCCTCAAACGGCGACTGCTATGA |
| | | AAAGATCGATTATAAGCTCCTGCCCGGCGCAAACAAGATGCTGCCAAAAGTG |
| | | TTCTTTTCTAAGAGCCACATCGATGAGTATGCCCCCAGCGACGTGATCATCG |
| | | AGAATTATAAAAAGGGCACACATAAGAAGGGCGCCGACTTCAGCCTGCAGG |
| | | ACTGCCACAGACTGATTGATTTCTTTAAGCAGTCCATCTCAAAGCACGAGGA |
| | | TTGGTCTAAATTCGGCTTTCAGTTTAGCCCCACCTGCTCATACGAAGATATCA |
| | | GCGGGTTCTATCGGGAAGTGGAGCAGCAGGGCTATATGCTGTCCACACACCC |
| | | TGTGTCTAGCGCCTATATCGATGAGATGGTGGCCGAGGGCAAGCTGTTCCTG |
| | | TTCAGGATTTGGAATAAGGATTTTTCCGAATACTCTAAAGGCACTCCCAATCT |
| | | GCACACCCTGTATTGGAAGATGCTGTTCGACAAGAGAAACCTGGCCGATGTG |
| | | GTCTACAAGCTGAACGGCCAGGCCGAAGTGTTCTACAGGAAGGCTAGCATCA |
| | | AACCAGACAACCGGATCATTCACCCTGCTAACCAAGATATCAAGAACAAGA |
| | | ACGCCCTGAACGAGAACAAGACTTCTAGGTTCGAGTATGATATCATCAAAGA |
| | | CCACAGATACACCGTGGATAAGTTCCAGTTTCACGTGCCCATTACAATTAAC |
| | | TTCAAGGCCATCGGCCAGGCCAATATTAATCCCATTGTGAACGATGCCATCA |
| | | GGAAGGGCGTGTTCACACACATCATCGGAATCGATCGGGGAGAGCGGCACC |
| | | TGCTGTATCTGTCCCTGATTGATCTGAAGGGGCGCATTATCAAACAGATGAC |
| | | CCTGAATGAGATCGTGAATGAGTACAACGGCCACTCCCACGCCACCAATTAT |
| | | CGGGACCTGCTGGCCAACAGAGAGGGCGAGAGAACTACCGCCCGCAGGTCT |
| | | TGGGATACCATCGAGAACATCAAGGAGCTGAAGGAAGGCTACCTGAGCCAG |
| | | GTGATCCACGTGATTACCAAGATGATGGTGGAATACAAGGCCATCGTGGTCG |
| | | TCGAAGACCTGAATACCGGCTTCATGAGGGGAAGGCAGAAGATCGAGAGAC |
| | | AGGTCTACGAGAAGTTCGAGCGGATGCTGATCGAGAAGCTGAATTGCTACAT |
| | | TGACAAACAGACAACCCCCACCGCCGAGGGCGGCCTGCTGCATGCCCTGCA |
| | | GCTGACCAATAAATTCGAGAGCTTTAAGAAGCTGGGGAAGCAGTCCGGGTG |
| | | CCTGTTCTACATCCCTGCCTGGAATACCTCTAAGATAGACCCCACCACCGGGT |
| | | TCGTGAATCTGTTCGACACCAGATACGAAACTCGGGAGAAATCGCGGCTGTT |
| | | CTTCAGCAGATTTGATAGAATTGCCTATAACAGAGACAAAGATTGGTTCGAA |
| | | TTCTCATTTGATTACAATAATTTCACAACCAAGGCCGAGGAGTGTCGGACCA |
| | | GGTGGACCCTGTGTACCCAGGGAACCCGGATTATCAACTTTAGAACCCCTCA |
| | | GAAGAACAATCAGTGGGAGGACGAGGAAGTGAACCTGACCGTGCTGTTCAA |
| | | GCAGTTGTTCGACCGGTACGACATCAACATCCATGGAAATCTGATGGAGACA |
| | | ATTCAGCAGCAGACCGAGGCCAAGTTCTACCAGGAACTGATGCACCTGCTGA |
| | | AGCTGACACTGCAGATGCGCAACTCTAGGACCAACTCCGAGGTGGACTACCT |
| | | GCTTTCCCCTGTGGCTGATGAGCACGGACACTTCTTCGATAGCAGGGAGGAC |
| | | ATCGAAACTCTGCCAAACAACGCCGACGCCAACGGGGCCTACAACATTGCCC |
| | | GGAAGGGCCTGTGGGTGATCAGAAAGATCCAGGAGACACCAGAGGGCGAGA |
| | | GACCCTCCCTGGCCATCACAAATAAAGAGTGGCTGCAGTTCGCCCAGACTAA |
| | | ACCCTACCTGAATGATTGA |
| 189 | 149 | ATGACTCAGAAATTCGACGACTTCATTCACTTATACTCTCTGAGTAAGACTCT |
| | | GCGGTTCGAGGCAAGGCCCATCGGTGACACTCTGCGCAACTTTATTAAAAAC |
| | | GGGCTGCTTAAACGGGACGAACATCGAGCCGAGTCATACGTGAAAGTGAAG |
| | | AAGCTGATTGACGAGTACCACAAGGCGTTCATTGACAGAGTTTTGTCTAACG |
| | | GGGGACTGAATTATGAGGATAAAGGGGAGTATGACTCCCTGACTGAGTACTA |
| | | TGTCCTATATTCCACGACCCGCCGGGACGAAACCACCCAGAAACATTTTAAA |
| | | GCCACACAGCAGAACCTGCGAGATCAGATAGTGAAAAAACTCACAGATGAC |
| | | GACGCTTATAAGCACCTTTTCGGCAAGGAATTGATCGAATCCTACAAAGACA |
| | | AAGAAGATAAGAAGAAGCTCCATGAGGCAGATCTGGTACAGTTCATTAATA |
| | | CCGCCAATCCGAAACAGAGACTGAATTTCTCTAAGAAGGAGGCTATTGACCT |
| | | TGTCAAAGAGTTTTGTGGGTTCACCAGTTATTTTGGCGACTTCCACAAGAATA |
| | | GAAAGAATATGTACAGCGCCGAAGAAAAGTCAACCGGTATCGCGTATCGCTT |
| | | GATCAATGAGAATCTGCCAAAATTCATTGATAACATGGAGTCCTTCAAGAAA |
| | | ATTGCTGCAATCCCAGAAATGGAAGATAACCTGAAAGAGATTCACGACAATT |
| | | TTGCCGAGCACTTAAATGTCGAGAACATTCAGAACATGTTCCAGCTCAACTA |
| | | TTATAACCAGTTGCTTACCCAGAAACAGATCGATGTGTACAATGCCATAATC |
| | | GGGGGTAAAACGGATGAGGAGCATAAAGAAAAGATCAAGGGGATTAACGA |
| | | ATATGTGAACCTCTATAACCAGGCTCACAAGGACGCTAAGTTACCAAAGCTT |
| | | AAGACCCTGTTTAAGCAGATACTCTCTGACCGTAACGCAATCTCCTGGCTGC |
| | | CCGAGGAGTTCGACAATGACCAGGAGGCCCTCAACGCTATCTTAGACTGTTA |
| | | CGCGCGGCTCAGTGAAAATGTTCTGGGGAAGGAGAATCTTAAACGGCTGCTG |
| | | TGCAGCTTGAGCGAATATGATACTAAGGGTATATTTCTGCGGAATGATCTCC |
| | | AACTTACGTCAATCTCAAAAAAGATGTCAGGTAGTTGGACTGATATCCCCTC |
| | | TGCAATCAAAAATGACATGAAGGATGGAGCCCCTGCCAAAAAAAGAAAAGA |
| | | AAGCGAAGAGGATTACGAAAAGCGGATCGACAACCTGTTTAAGAAACTCGA |
| | | CTCTTTCTCTATAGGCTACATCGACGATTGTTTGAACAAGTTCGACAACAACA |
| | | ATACCTTTACAATCGAAGGATATTTCAAGGAATTGGGAGCAAAAGATACCCA |
| | | GTCAGAAGACATCTTCAAGCAAATCGCTAACGCATACACAGACGTCAAGCCT |
| | | CTCCTGAACTCTCCTTACCCCAAGTCCAAGAATCTGAGCCAAGATAAGGAGA |
| | | ACGTCAAAAAGATTAAGAGGTTCCTTGACGCCCTGATGTCCCTGGTTCACTTT |
| | | GTGAAACCATTGCTGGGAAATGGCGATGAGAGCAATAAAGATGAGAAGTTC |
| | | TACGGAGAGCTCTCACTACTGTGGACAGAGTTAGAGACAATAGTGCCTCTTT |
| | | ATAACATGGTACGAAATTACATGACACGGAAGCCATACAGTAACTCCAAGAT |
| | | CAAACTCAATTTCGAAAATAGCCAACTGCTTGGCGGGTGGGATGTAAATAAA |
| | | GAAAAGGAGCGCGCTTCCATCCTACTCAGACGCAATGGCCTGTACTATCTGG |
| | | CTATTATGGATAAAGACTCTAGCAAACTGTTGGGCAAAAGTATGCCAAGCGA |
| | | CGGTGAGTGCTATGAGAAGATGGTGTATAAACAAATCTCGTTTAACAGCGGC |
| | | TTTGGGGGGTTCATTAGGAAGTGCTTTAACTCAGCTACGGAATTAGGATGGA |
| | | AATGTAGCCCTACATGCCTCAATAAGGATGGCAAGATAATAATACTCGACGA |
| | | GGAAGCTACAGACATAAGACCAGAGCTCATTGACAACTATAAATCATTCCTC |
| | | GATATCTACGAGAAAGATGGCTATAAATACAAGAACTTTGGGTTTCACTTCA |
| | | AGAAATCGTCTGAATATGAGAACATCAACGATTTCTTCAAAGAAGTCGAGCA |
| | | GCAAGGATATAAGATCACCTTCACGAATGTCTCAGTGGCATTTATCGACAAG |
| | | CTGGTGAAAGAAGGAAAGATGTACCTTTTCCAAATCTACTCCAAGGATTTTT |
| | | CCGAGTACTCTAAGGGCACACCGAATATGCACACTCTGTACTGGAAAGCCTT |
| | | GTTCGATGATAGGAACCTAAAGGATGTTGTGTACAAGCTAGACGGCCAGGCT |
| | | GAGATGTTTTTCCGAAAAAAGAGCATCAACTGTAATCACCCAACACATCCTG |
| | | CCAATCAGCCCATTCAGAACAAGAACAAGGATAACAAGAAAAAGGAGAGTG |
| | | TCTTTAAGTATGACCTCACTAAGGACAGGAGATATGCCGTGGATAAGTTTAT |
| | | GTTTCATGTGCCTATCAAGATGAACTTTAAGTCCACTGGGACAGAGAACATC |
| | | AACCTGCCTGTGAGAGAGTACCTGAAAACTAGTAATGACACTCATATTATCG |
| | | GAATTGACAGAGGCGAGAGGCACCTGCTCTACCTGGTGGTCATTGATTTACA |
| | | CGGTAACATCGTGGAACAGTATTCACTCAATGATATCGTAAATGAGTACAAT |
| | | GGCAATACTTACAGGACCAACTACCATGATCTGCTTGATGCTCGTGAAGAAG |
| | | ACAGGCTGAAGCAGAGGCAGTCGTGGCAAACAATTGAGAACATCAAAGAAC |
| | | TGAAGGAGGGTTACTTAAGTCAGGTTATACACAAGATAACCCAGCTGATGAT |
| | | CAAGTACCATGCAATCATAGTGTTAGAAGATCTGAACATGGGATTTATGCGT |
| | | GGCCGTCAAAAAGTGGAGAAGCAGGTCTACCAAAAGTTCGAGAAGATGCTG |
| | | ATTGATAAGCTAAATTACCTGGTCGATAAGAAGGCGGACATTGAGAGCACTG |
| | | GAGGTCTGCTTAACGCCTATCAGTTGACTAATAAGTTTCCCGGTTTCAAAAAC |
| | | CTGGGCAAGCAGAGCGGGTTTCTTTTCTACATTCCCGCATGGAACACCAGCA |
| | | AAATCGACCCCGTAACCGGGTTTGTTAACCTGCTCGACATTCGCAATGTTGAT |
| | | AAGGCCAAGGCATTCTTCGCCAAATTTGACAGCATTTGGTACAATAAAGAGA |
| | | AGGACTGGTTTGAGTTTGCCTTAGACTATGATAAATTCGGCAGCAAAGCCGA |
| | | GGGCACCAGAACTAAATGGACCCTTTGCACCCAGGGCAAACGCATCAAGAC |
| | | ATTCAGGAATGCCGACGAAAACTCCAACTGGGATTATCAGATTATAGACTTG |
| | | ACCAAGGATCTGAAGCAACTATTTGCCCAATACAATATCGACATCAATGGGA |
| | | ACCTAAAAGAAGCGATCTCTAATCAGACAGAAAAGACGTTTTTCGTGGAGCT |
| | | TTTGGGCCTGCTGAAACTGACATTGCAGATGCGGAACAGTATTACCGGAACG |
| | | GAAACCGATTATTTGGTGAGTCCGGTTGCCGACGAAAATGGAAATTTCTATG |
| | | ATTCCCGAACATGCGGGCATAGCCTCCCTGAAAACGCCGACGCTAACGGAGC |
| | | TTTTAATATAGCACGCAAGGGCTTGATGATTATTGAACAGATTAAAGCGTCC |
| | | GACAACCTCTCCAAGCTCAAATTTGACATTTCTAACAAATCCTGGCTCAATTT |
| | | CGCACAGCAAAAACCCTACAAACATGAGTGA |
| 190 | 150 | ATGAAAAGAAAGTTCGACGATTTCATCCACCTGTACAGCCTGAGCAAGACTC |
| | | TGCGATTCGAGGCCAGCCCCATCGGAGACACACTGCGGAATTTCAAAAAGA |
| | | ATGGCCTGCTGGAGCGGGATAAACACAGAGCCGAGTCATACGTGAAAGTGA |
| | | AAAAGCTTATCGACGAGTACCACAAGGTGTTTATCGATAGAGTGCTGAACGG |
| | | CAGCGTGCTGAACTACGTGAACAAGGGCAAGTATGACTCCCTGACAGAGTAC |
| | | TATGACCTGTACAGCGTCCCAAAGAAGGATGAAACCTCTCAGAAGCACTTCA |
| | | AGGCCATCCAGCAGCACCTGAGACAGCAGATTGTGAAGAAATTCACCGACG |
| | | ACAAAAACTACAAGAGACTCTTTGGCAAAGAGCTGCTGGAGTCCTACAAGG |
| | | ATAAAGAGGACAAGAAGAAGCTGAATGAGGCCGACCTGGTGCAGTTCATTA |
| | | ATGCCGCCAACCCCGAACAGCTGCTGTCCCTGAGCAAGAAGGAGGCCATCG |
| | | ATCTGGTGCAGGAATTTTCCGGATTCACCACTTACTTCAACGAGTTTCACAAG |
| | | AACAGGAAAAATATGTACAGCGCCGAGGAAAAAAGTACAGGCATCGCCTAC |
| | | AGGCTGATCAACGAGAATCTCCCAAAATTCATCGATAATATGAAGAGCTTCA |
| | | AGAAGATCGTGGACATCCCAGAGATGAAGGATAATCTCAAGCAGATCCACG |
| | | AATATTTCGTGGACTACCTGAACGTCGAAAACATCCACGAAATGTTTCAGCT |
| | | GGACTACTATAACCAGCTGCTGACCCAGAAGCAGATCGACGTGTACAATGCA |
| | | ATTATCGGAGGGAAAACCGACAATGAGCATAAGGAGAAAATCAAAGGGATC |
| | | AATGAGTACGTGAACCTGTACAACCAGACCCACAAGGACGCCAAACTGCCC |
| | | AAGCTGAAGGTGCTGTTTAAGCAGATCCTGAGCGACAGGAACGCCATCAGTT |
| | | GGCTGCCAGAGGAGTTCAAGGATGATCAGGAGGTGCTGAACGCCATCAAGG |
| | | ATTGCTACGCCCGGCTGTCTAAAAACGTGCTGGGAGATAATATCCTGAAAGA |
| | | ACTGCTGTGCTCACTGGCCGAATACGACACCAAGGGCATCTTCCTGCGGAAC |
| | | GACCTGCAGCTGACCGATATTAGCCAGAAGATGTTTGGGAACTGGTCAGTGA |
| | | TTCCCAGCGCCATTAAGAAGGATGTGGCCCCTGCAAAGAAGCGTAAAGAGCT |
| | | GGAGGAGGACTATGAGAAACGGATCGACAACCTGTTCAAGAAACGCGAAAG |
| | | CTTCAGCATTGACTATATCGACAGCTGCCTGGATAAATTCGACGAGAACAAC |
| | | ACTCACACAATCGAGGGGTACTTTGCCACACTGGGCGCCGTTGATACCCCCA |
| | | CCACACAGAGAGAGAACATCTTTGCCCAGATCGCTAACACCTACACAGACCT |
| | | GGAACCACTGCTGAAGTCACCCTACAGCAAGAATAAGAACCTGAGTCAGGA |
| | | CAAGGACAATGTCGCCAAGATTAAGCTGTTTCTGGATGCCCTGATGAGCCTG |
| | | ATGCACTTCGTGAAGCCACTGCTGGGCAAGGGGGACGAGAGCAACAAGGAT |
| | | GAGAAGTTTTATGGCGACTTCACACTGCTCTGGACCGAGCTTGAGACCGTGG |
| | | TGCCTCTGTATAACATGGTGAGAAACTACATGACCAGAAAGCCTTACTCAAA |
| | | ATCCAAAATTAAGCTGAATTTCGACAACAGCCAGCTGCTGGGCGGGTGGGAC |
| | | GCCAACAAGGAGAGCGACTACGCTAGCATCCTGCTGCGCAGAGATGGGAAG |
| | | TACTACCTGGCCATCATGGACAAGGATTCTAAGAAACTGCTGGGCAAGAGCA |
| | | TGCCTTCTGACGGCGAGTGCTACGAAAAGATGGTGTATAAGCTGCTGCCAGG |
| | | CGCCAATAAGATGCTGCCAAAGGTCTTCTTTGCCACAAGCCGCATTAAGGAC |
| | | TTCAAGCCATCAGAGCAGCTGCTGGAGAACTACAACAAGGGAACCCACAAA |
| | | AAGGGAGTCAATTTCTCCATCTCTGATTGCCATGCCCTGATCGATTACTTTAA |
| | | GCAGTCCATTAATAAGCACGAGGATTGGAAGAATTTCAACTTTAACTTCAGC |
| | | GAGACATCCACATACGAGGACCTGTCAGCCTTCTACAGGGAGGTGGAGCAG |
| | | CAGGGCTACAAGATCACCTTTACCAATGTGAGCGTGTCATTTATCGACAAAC |
| | | TGGTGGAGGAGGGCAAGATGTACCTGTTCCAGATCTATAACAAAGATTTTTO |
| | | AGAGTACTCCAAGGGCACCCCGAACATGCATACTCTCTATTGGAAGGCCCTG |
| | | TTCGACGAGCGGAACCTGAAGGATGTGGTGTACAAGCTGAATGGCCAGGCC |
| | | GAAATGTTCTTCAGGGAGAAATCCATCAAGGTCAGCACAATCCACCCCGCTA |
| | | ATCGCCCTATCCAGAACAAAAATAAGGACAACAAGAAAAAAGAGTCAATCT |
| | | TCGAGTACGACCTCATCAAGGACAGGCGCTACACCGTGGATAAGTTCATGTT |
| | | CCACGTGCCCATCACTATGAACTTTAAGTCTGCCGATACCGAGAACATTAAT |
| | | CTGCCCGTGAGAGAATACCTGCAGACTTCTGACGACACACACATCATCGGAA |
| | | TCGATCGCGGCGAACGGCATCTGCTGTACCTGGTCGTCATCGATTTGCAGGG |
| | | CAATATCGTGGAGCAGTATACTCTGAATGATATTGTGAACGAATACAACGGC |
| | | AACACCTACAGGACAAACTATCATGATCTGCTGAACGCTAGAGAGGCAGAG |
| | | AGGCTGAAGGCCAGACAGTCTTGGCAGACCATTGAGAACATCAAGGAGCTG |
| | | AAGGAGGGGTACCTGTCTCAGGTGATCCATAAGATCACCCAGCTGATGATTA |
| | | AATACCACGCCATCGTGGTGCTGGAGGATCTGAACAAGGGCTTTATTCGCGG |
| | | CCGCCAGAAGGTGGAGAAGCAGGTGTATCAGAAGTTCGAGAAAATGCTGAT |
| | | CGATAAGCTCAATTATCTGGTGGACAAAAAAGCTGATATCGAGACCACCGGG |
| | | GGCCTGCTGAACGCCTACCAGCTGACCAGTAAATTCGAGTCTTTCCAGAAAC |
| | | TGGGAAAGCAATCCGGTTTCCTGTTTTACATCCCCGCCTGGAACACAAGCAA |
| | | GATCGATCCAGTGACCGGCTTCGTGAATCGGCTGGACACCAGGTACCATAAC |
| | | GTGGACAAAAGTAAAGCTTTTTTCGCTAAATTTGATAGCATCCGGTACAACA |
| | | AAGAAAAGGACTGGTTTGAGTTCGCCCTGGACTATAAGAACTTTGGAAACAA |
| | | GGCCGAAGGGACAAGAACAAAGTGGACCCTCTGCACCCAGGGCAAACGGAT |
| | | CAAGACATTCAGGAACGCCGAGAAAAATAGCAATTGGGACTACCAGATCAT |
| | | CGACCTGACTAAAGAACTGAAGCAGCTGTTCGCCCATTACGACATAGACATC |
| | | AATGGCAATCTGAAAAAGGCTATCTCTAACCAGACTGAGAAGACATTTTTCG |
| | | TGGAGCTCATGCAGTTTCTGAAGCTGACCCTGCAGATGCGTAATTCAATCAC |
| | | CAACACTGAGACCGATTATCTGGTGTCCCCAGTGGCCGATGAGAATGGCAAT |
| | | TTCTACGACAGCCGCAAATGCGGCTCCTCACTGCCCGAGAATGCCGACGCTA |
| | | ACGGCGCTTTTAACATCGCTAGGAAGGGGCTCATGATCATCGAGCAGATCAA |
| | | GGCAAGTGACGACCTGTCCAAGCTGAAGTTCGACATTTCTAACAAAAGTTGG |
| | | CTGAACTTCGCCCAGCAGAAACCCTACAAACATGAATGA |
| 191 | 151 | CTGGTCCAGTTCATCAATACCGCCAATCTGAAGCAGAGACTGAACCTGAGCA |
| | | AAGAAGAAGCCAAAGACCTGGTGCAGGAATTTTGTGGCTTCACCACATATTT |
| | | TGGCGACTTCTACCAGAACCGCGAAAACATGTACTCCGCCGAGGAGAAGTCC |
| | | ACCGGCATCGCCTACCGGCTGATCAACGAGAATCTGCCCAAGTTCATCGATA |
| | | ATATGGAGACTTTTAAAAAGATCGCTGCCATCCCCGAGATGGAGGACAACCT |
| | | GAAGGAAATTCACGACAATCTGTCTGAGCACCTGAATGTGGAGAACATCCAG |
| | | GACATGTTTCAACTGAATTACTATAATCAGCTGCTGACCCAGAAGCAGATCG |
| | | ATGTGTACAATGCCATTATCGGCGGGAAGACCGATGATGAGCACAAAGAGA |
| | | AGATTAAGGGCATTAACGAATATGTCAATTTATACAACCAGGCTCACAAGGA |
| | | CGCCAAACTGCCTAAGCTGAAGACCCTGTTTAAGCAGATCCTGTCTGACAGG |
| | | AATGCTATCTCCTGGCTGCCTGAAGAGTTTGACAACGATCAGGAGACCCTGA |
| | | ACGCCATCAAGGACTGCTATGCCCACCTGTCCGGCAACATCCTGAAGGACGA |
| | | GAACCTGAAACGGCTGCTGTGCTCCCTGAGCGAGTACGATACCAAAGGCATC |
| | | TTCCTGAGAAATGATAGCCAACTGACCTCCATCTCCAAGAAAATGTCCGGGT |
| | | CTTGGACAGACATCCCCAGCGCCATCAAGAATGACATGAAGGACGGAGTGC |
| | | CCGCTAAGAAGAGAAAAGAGAGCGAAGAGGATTATGAGAAACGGATCGAC |
| | | AACCTCTTCAAGAAGCAGGACTCTTTCAGCATCGATTACATGGATGCCTGCC |
| | | TGAATAAGTTCGTGGAAAACAACCCTTACACTATTGAGGGGTATTTCAAAGA |
| | | GCTGGGGGCTAAGGATACTCAGAGCGAAGATATCTTTAAGCAGATCGAGAA |
| | | CGCCTACACCGACGTGAAACCTCTGCTGAATAGCACATATCCTAAGAATAAG |
| | | AACCTGTCCCAGGACAAGGAGAACGTGGCCAAGATTAAACGCTTCCTGGATA |
| | | CCCTGATGAGTCTGGTGCACTTCGTGAAGCCTCTGCTGGGAAAAGGCGACGA |
| | | GAGGAACAAGGACGAAAAATTCTATGGCGAGCTGTCCCTGCTGTGGACAGA |
| | | ACTGGAAACCATCGTGCCTCTGTACAACATGGTGAGAAATTACATGACCAGG |
| | | AAGCCTTACTCCAACAGCAAAATCAAGCTGAATTTTGATAACTCACAGCTGC |
| | | TGGGAGGATGGGACGCCAACAAAGAAAGCGATTACAGCTCCATOCTGCTGT |
| | | ATAGGGATGGAAAGTACTACCTGGCCATCTTCGACAAGGATTCTAAGAAACT |
| | | GCTCGGGAAAAGTATGCCCTCCGACGGGGAGTGCTACGAGAAGATGGTGTA |
| | | TAAGCTGCTGCCTGGAGCCAATAAAATGCTGCCCAAGGTGTTCTTCGCCAAG |
| | | AGCAGGATTAAGGACTTTAAACCCAGCGAGCAACTGCTGGAAAAGTATAAC |
| | | AAAGGTACTCACAAAAAGGGCAAGAATTTCTCCATCAGCGACTGCCACGCAC |
| | | TGATTGACTTTTTCAAGCAGAGCATTAACAAACACGAAGATTGGAAAAACTT |
| | | TGACTTCAACTTTAGTGAGACCTCCACCTACGAGGACCTGAACTCCTTTTATA |
| | | GGGAGGTGGAACTCCAGGGCTATAAGATCACATTCACTAAGGTGAGCGCTTC |
| | | CTTCATCGACAAGCTGGTGGAAGAAGGCAAAGTGTACCTGTTCCAGATCTAC |
| | | AATAAGGACTTCAGTGAGTATTCTAAGGGCACTCCTAACATGCACACCCTGT |
| | | ACTGGAAAGCCCTGTTCGACGATAGAAACCTGAAAGATGTGGTGTATAAACT |
| | | GAACGGCCAAGCCGAGATGTTTTTCAGAAAGAAGTCTATCAACTGCAACCAC |
| | | CCCACACACCCAGCAAACCAGCCCATTCAGAACAAGAACAAGGACAATAAA |
| | | AAGAAGGAGAGCGTGTTTGAATATGACCTGATCAAAGACCACCGGTATACC |
| | | GTGGATAAATTCATGTTCCATGTGCCCATTACAATGAATTTTAAGTCCACAAA |
| | | CGAGAAGGATATCAATCTGCACGTGCGCGAGTACCTGCAGACCAGTAATGAC |
| | | ACCCACATCATTGGCATCGACCGGGGCGAGCGCCATCTGCTGTATCTGGTGG |
| | | TGATCGACCTTCACGGCAATATCGTGGAACAGTACACACTGAACGACATCGT |
| | | GAATGAGTATAATGGCAATACCTACAGGACCAATTACCACGACCTGCTGGAC |
| | | GCAAGGGAGGAGGACAGGCTGAAGCAGAGGCAGTCCTGGCAGACCATCGAG |
| | | AACATCAAGGAACTGAAGGAGGGATATCTGTCTCAGGTGATCCACAAAATC |
| | | ACCCAGCTGATGATTAAATACCACGCCATTATCGTGCTGGAAGACCTGAATA |
| | | TTGGCTTCATGAGGGGCAGACAGAAAGTGGAGAAGCAGGAGTACCAGAAGT |
| | | TCGAGAAGATGCTCATCGACAAGCTGAACTACCTGGTGGACAAGAAAGCTG |
| | | ATATCGAGAGCACCGGAGGCCTGCTCAACGCCTATCAGTTGACCAATAAGTT |
| | | CGCCAGCTTTAAAAAGCTGGGGAAGCAGTCCGGCTTTCTGTTTTACATCCCTG |
| | | CCTGGAATACGAGCAAAATTGATCCTGTGACTGGCTTCGTGAATCTGCTGGA |
| | | CACCCGTTATCAGAACGTGGACAAGGCTAAGGCTTTCTTCGCCAAATTCGAT |
| | | AGCATCAGGTACAACAAGGACAAGGACTGGTTCGAGTTCGCCCTGGATTACA |
| | | ACAATTTCGGCAGCAAGGCCGAGGGAACCAGGACCAAATGGACACTGTGTA |
| | | CACAGGGAAAGAGAATCAAGACATCCTTCAATAAGATGAGTTCCAAATGGA |
| | | ACAACCAGGAAATCGACCTTACTAAGGATCTGAAACAGCTGTTTGTGCAGTA |
| | | CGATATCGATATCAACGGCAACCTGAAAGAGGCCATCTCTAAACAGACCAA |
| | | ATATACCTTTTTCGTGGAGCTCATGGGCCTGCTGAAGCTGACCCTGCAGATG |
| | | AGAAATTCCATCACCGGAACCGAGACAGACTACCTGGTGTCCCCCGTGGCCG |
| | | ACGAGAATGGCAATTTCTATGACTCCAGAACCTGTGGCCCCAGCCTTCCTGA |
| | | GAACGCCGATGCCAACGGCGCCTTCAACATCGCCCGGAAGGGTCTGATGATT |
| | | ATCGAGCAGATTAAGGCATCCGACGACCTGAGCAAGCTGAAGTTCGATATCA |
| | | GCAATAAGAGCTGGCTGAATTTTGCCCAGAAGAAGCCCTACAAGCACGAAT |
| | | AG |
| 192 | 152 | ATGGCCAAGAAATTCGAGGACTTTACCAAACTGTATCCTCTGTCCAAGACCC |
| | | TGTGCTTCGAGGCCAGGCCTATCGGAGCCACTAAGTCCAATATCATTAAGAA |
| | | TGGACTGCTGGACGAAGACAAGCATAGAGCTGAGAGCTACGTGAAAGTGAA |
| | | GAAGCTGATTGACGAGTATCACAAGGCCTTTATCGACAGGGTGCTGGCCGAC |
| | | GGGTGTCTGTGTTACAAGAACGAGGGAAACGAGGACTCACTGGAGGAGTAT |
| | | TACGAGTTCTACAGCCTCTCCTCCAAGGATAAAAGCGATGACACCAGAAAGC |
| | | ACTTTGCTACAATCCAGCAGAACCTGCGGTCTAAAATCGCCGAGACCCTGAC |
| | | CAAGGACAAAGCCTACGCTAACCTTTTCGGGAACAAACTGATTGAATCACAT |
| | | AAAGATAAGGAGGATAAGAACAATATCATTGATAGTGATCTGATCCAGTTTG |
| | | TGAGCACCGCTACCCCCGATCAGCTGGACAGCCAGAGCAAAGATGATGCCA |
| | | CCAAACTGATTAAGGAGTTCTGGGGATTTACTACCTACTTCACCGGGTTTTTC |
| | | GAAAATCGGAAAAACATGTACACAAGCGAAGAGAAGTCCACAGGGATCGCA |
| | | TACAGGCTGATCAATGAGAACCTGCCCAAGTTTATTGATAACATGGAAAGCT |
| | | TCAAAAAGATCATGGAGAAACCCGAAATGTCCGCCAACATGGAGGAACTGA |
| | | GAGCCAACCTGGAAGAGTACCTGAACGTGGAATCCATCTCCGAAATGTTCGA |
| | | GCTGAATTACTACAACATGCTGCTGACTCAGAAGCAGATCGACGTGTATAAT |
| | | GCCGTGATCGGCGGCAAGACCGACGAAGAACAGGATATCAAAACAAAGGGA |
| | | ATTAATGAGTACGTGAACCTGTATAATCAGCAGCACAAAGACGCCAAGCTGC |
| | | CCAAGCTGAAGACCCTGTTCAAGCAGATTCTCAGCGACAGAAACGCTATTTC |
| | | ATGGCTGCCCGAAGAGTTCGACAAGGACCAGAATGTGCTGAATGCCATCAA |
| | | GGACTGTTACGTGAGACTGACCGCAAACGTGCTGGGCAACAATGTGCTGAAC |
| | | AGCCTGCTGAGCACTCTGTCTGAGTACAACACAGAGTCAATCTTCATCAGGA |
| | | ACGACATCCAGCTGACTAACATTTCCCAGAAGATGGCCGGCAGCTGGAACTA |
| | | CATCCAGGACGCCATCAAGCAGGACATCAAGAACGTGGCCCCTGCCCGTAA |
| | | GAGAAAAGAGAGCGAGGAGGACTATGAGGAGAGAATCTCTAAAAACTTCAA |
| | | GAAGGCCGACTCCTACTCCATCAAATACATTGACGACTGCCTGAATCGCGCC |
| | | TACAAGAACAACACCTACACAGTGGAGGGCTACTTCGCCACCCTTGGCGCCA |
| | | CCAATACCCCTTCCCTGCAGAGGGAGAATCTGTTCGCCCAGATCGCTAACGC |
| | | CTATACAAACATCTCCAGCCTGCTGTCTAGCGACTACTCCGCCGAAAAAAAC |
| | | CTGGCCCAGGATAAGGAGAATGTGGCCAAGATCAAGACCCTGCTGGACTGC |
| | | ATCAAATCACTCCAGCATTTCGTGAAACCACTGCTGGGAAAAGGGGACGAGT |
| | | CAGATAAAGACGAGAGGTTCTACGGCGAGCTGAGCATGCTGTGGAAAGAAC |
| | | TGGATACTGTGACCCCTCTGTATAACATGGTGAGGAATTACATGACCCGCAA |
| | | GCCTTACAGCCAGAAGAAGATCAAGCTGAACTTCGAAAACCCCCAGCTGCTG |
| | | GGAGGCTGGGATGCCAACAAGGAGAAAGACTACGCCAGCATCCTGCTGCGC |
| | | AGGGACGGCAAATACTATCTGGGAATTATGGACAAAGAGAGCAAGAAGCTG |
| | | CTCGGAAAGCCCATGCCTAGCGATGGCGATTACTACGAAAAGATGGTGTACA |
| | | AGTTTTTTAAAGATATTACAACCATGATCCCAAAGTGTAGCACCCAGCTGAA |
| | | GGCCGTGAAGGAGCACTTTTCTAAGAGCAACGCTGACTTCGTGCTGTCCGGC |
| | | AAAAACTTCAATACCCCACTGATCATTTCCAAAGAGGTCTTCGAACTGAACA |
| | | ATGTGAAGTATGGGCAGTTCAAGAAATTCCAGAAGGACTATGTGGCCACCAC |
| | | CAACGATATCGAAGGGTACGCCCACGCCGTGAAGATCTGGATTAAGTTCTGC |
| | | ATGGATTTCCTGGGCACCTACGACAGCACTATTTCTTATGACCTGTCAAGTCT |
| | | GGCCAGTAACGAGTATACCAGCTTGGATACATTCTACCAGGATGTGAATCGC |
| | | CTGCTGTATGCCGTGAGCTTCATCAAAGTGAGCGTGTCTCATATCGACTCCCT |
| | | GGTGGAGGAAGGAAAAATGTACCTGTTCCAGATCTATAATAAAGACTTCAGC |
| | | GAATATAGCAAGGGTACCCCCAACATGCACACCCTGTACTGGAAGGCCCTGT |
| | | TCGATGAGAGGAATCTGGCCGACGTGGTGTATAAGCTGAACGGACAGGCCG |
| | | AGCTCTTCTATAGAGAGAAGTCCATCGATTGCACACACCCTACTCACCCAGC |
| | | CAACCACCCAATCTTGAATAAGAATAAGGACAACGAAAAAAAGGAGTCCAT |
| | | CTTCGAGTACGACCTCATCAAGGACCGCCGATACACCGTGGATAAGTTCATG |
| | | TTCCACGTGCCCATTACTATGAATTTCAAAAGCACCGGGGCCGACAATATCA |
| | | ATCAGCTGGTGAGAGAGCACCTGAAGGACGCCGACGCCCCCCACATTATCGG |
| | | AATCGACAGAGGTGAGAGACACCTGCTCTATCTGGTGGTCATTGATATGCAC |
| | | GGCAACATCAAAGAGCAGTTCACCCTGAACGACATCGTCAATGAGTATAATG |
| | | GCAACACCTATCGGACCAATTATCACGATCTGTTGGATGCTCGGGAGGACGC |
| | | AAGGCTGAAGGCCAGGCAGAGCTGGCAGACAATTGAGAATATCAAGGAGCT |
| | | GAAGGAAGGCTACTTGTCTCAGGTGATTCACAAAATCACCCAGCTGATGGTG |
| | | AAGTACCATGCTATTGTAGTGCTGGAGGACCTGAGCATGGGTTTCATGAGGG |
| | | GCAGGCAGAAGGTGGAAAAACAGGTGTATCAGAAGTTTGAGAAGATGCTGA |
| | | TCGACAAGCTGAACTACTATGTGGACAAGAAGGCCAACGCCGAGCAGGCTG |
| | | GAGGTCTGCTGAATGCCTACCAGCTGACCTCCAAATTCGACTCTTTCCAGAA |
| | | GCTCGGCAAGCAATCTGGATTTCTGCTGTACATTCCCGCCTGGAACACATCC |
| | | AAGATTGACCCAGTGACCGGCTTTGTGAATCTGCTGGACACCCGCTACCAGA |
| | | ATGTGGAAAAGGCCAAAGCCTTCTTCTGCAAATTCGAGGCCATCAGATATAA |
| | | CTCCAACAAGAATTGGTTCGAATTTACCATTGATTACAACAACTTCGGCCAG |
| | | AAAGCCGAGGGCACAAGGACAAAATGGACCCTGTGCACACAGGGGAAGAG |
| | | AATCCGGACCTTTAGGAACCCCGAGAAGAACTCCGAGTGGGACAATCAGGA |
| | | GATCGATCTGACCAGCGCCCTGAAGAACCTGTTTGCCCACTACCACATCGAC |
| | | ATCAATGGGAACATTAAGGAGGCCATCTCCGCACAGTCTGACAAGACCTTTT |
| | | TTACCGAGCTGCTGCATCTGCTGAAGCTGACCCTGCAGATGCGGAACAGTAT |
| | | CACTGGAACTGAAACAGATTACCTGATTTCTCCCGTGGCCGACGACAATGGC |
| | | TATTTCTATGACAGCAGGACCTGTAATGATACTCTGCCCAAGAATGCCGACG |
| | | CCAACGGCGCCTACAATATAGCCAGGAAGGGCCTGATGCTGATCGAGCAGA |
| | | TTAAGAAGGCAAAGGATATCGCTAATATCAAATTCGATATTAGCAATAAGTC |
| | | TTGGCTGAACTTCGCTCAGCAGAAACCTTATAAGGACGAGTAA |
| 193 | 153 | ATGATTAAGGAGTTCGAGGACTTCAAAAGGCTGTATCCTATCCAGAAAACCC |
| | | TGAGGTTCGAGGCTAAACCTATCGGAAGCACCCTGGAACACCTGGTGAAGTC |
| | | AGGTATCCTCGATGAAGACGAGCATCGGGCCGCCAGCTACGTGAGGGTGAA |
| | | GAAGCTGATTGATGAGTATCACAAGGCCTTTATCGATAGAGTGCTGAACGAC |
| | | GGATGCCTCCCCTTTAAGAATAAGGGCGAGAAGAATTCCATTGAAGAGTACT |
| | | ACGAATCATACACCAGCAAGGATAAAGAGGAGGATAGCAAGAAGAGGTTCA |
| | | AAGAGATCCAGCAGAACCTGCGAAGCATCATCGTGAATAAGCTGACAAAAG |
| | | ACAAGGCCTATGCCAACCTGTTTGGGAACTACCTGATCGAATCCCATAAGGA |
| | | TAAGGAAGACAAGAAAACAATGATCGACAGCGACCTGATCCAGTTTATTAA |
| | | AGACGCCGACTCTCTGGAGCTGGGCTCTATGTCTAAGGACGAAGCCATCGAG |
| | | CTGGTGAAGGAGTTTTGGTCCTTCACCACCTACTTTGTGGGCTTCTACGACAA |
| | | TAGGAAGAACATGTATAGCGCCGAGGAAAAGAGCACAGCCATTGCCTACCG |
| | | GCTGATCAACGAGAACCTCCCCAAGTTCATTGATAACATGGAGGCCTTCAAG |
| | | AAAATTATAAGCAGACCTGAGATTCAGGCCAACACGGAGCAGCTGTACAGC |
| | | GACTTTGCAGAGTACCTGAACGTGGAATCCATTCAGGAGATGTTCCAGCTGG |
| | | ATTATTATGACATTCTGCTGACTCAGAAACAGATCGACGTGTACAACGCCAT |
| | | CATTGGGGGGAAGACCGACGAGAAACACGACATCAAGACCAAGGGCATCAA |
| | | TGAGTACATTAATCTATATAACCAGCAGCACAAGGAGGACAAGCTCCCCAAG |
| | | CTGAAAGTGCTGTTCAAACAGATCCTGAGCGACCGAAATGCCATCTCCTGGC |
| | | TCCCTGAGGAGTTTAACTCCGACCAGGAGATGCTGATCTCTATCAAAGACTG |
| | | CTACGAGAAACTGTGCGTGAACGTGCTGGGCGACAAGGTTCTGAAGAGCCTG |
| | | CTGTCCTCCCTGGACGACTATGAGCTGGAGGGCATCTTTCTGCAGAATGACC |
| | | AGCAGCTGACAAATATCAGCCAGAAGATTTTTGGCTCCTGGAGCGTGATCCA |
| | | GGAAGCTATTATTAGGAATATCAAGAATACCGCCCCCGCCAGGAAGCATAA |
| | | GGAGACAGAGGAGGATTACGAGAAGAGGATCTTCAGCATTTTTAAGCAGGC |
| | | TGGGAGCTTCAGTATTAAATACATCGACGACTGCCTGTATGACCTGGACAAG |
| | | AATAACATCAACACAATTGAGAACTACTTTGCCACTCTGGGCGCCGAGAATA |
| | | CCCCCGAGATCCAGAGAGAGAATCTCTTTGCTCTGATCAAGAACGCCTATAC |
| | | TGATGTGGCCGGACTGCTGTGCAGCGAGTACCCTACTGAGAAGAATCTGTCA |
| | | CAGGATGAAAATCACGTGGCCAAAATTAAGGCCCTGTTGGATGCTATCAAGA |
| | | GCCTGCAGCACTTTGTGAAACCTCTTCTGGGCAATGGAGACGAACACGATAA |
| | | GGACGAGAGGTTCTATGGAGAGCTGGTGTCCCTCTGGACAGAGTTAGACACC |
| | | GTGACTCCCCTGTACAACATGGTGCGCAACAGGATCACACAGAAACCTTATA |
| | | GCCAGAAGAAGATCAAGCTGAATTTCGAGAACCCCCAGCTGCTGGGAGGAT |
| | | GGGACGCCAACAAGGAGAAAGACTACTCCTGTATCATCCTGCGCCGGGAGG |
| | | GCATGTATTACCTGGCCATCATGGACAAGGATAGCAGAAAGCTGCTGGGCAA |
| | | AGAGATGCCTAGCGACGGCGAGTGTTACGAGAAGATGGTTTACAAGCTGCTG |
| | | CCCGGCGCTAATAAAATGCTGCCCAAGGTGTTCTTCGCCAAGTCCCGGATCG |
| | | AGGAGTTCATGCCCTCCGAGCAGATCATCGAAAAGTACAACAACGGCACCC |
| | | ATAAAAAGGGCAAGGATTTCAACATCACCGATTGCCACAACCTCATTGACTA |
| | | CTTTAAGCAGTCTATCAATAAACACGAAGACTGGTCCAAGTTCGGGTTTACT |
| | | TTCTCAGAGACTAGCACCTACGAGGACCTCAGCGGGTTCTACAGGGAGGTCG |
| | | AGCAGCAGGGGTATAAGCTGAGTTTCACCAATGTTTCCGCCAGCTATATCAA |
| | | TAGCCTGGTGGATGAGGGAAAGATGTATCTGTTTCAGATTTACAACAAGGAC |
| | | TTCTCCGAATACAGCAAGGGCACTCCTAACATGCACACCCTGTATTGGAAGG |
| | | CACTGTTCGATGAGCAGAACCTGGCCGACGTGGTGTACAAGCTCAATGGCCA |
| | | GGCCGAGATCTTTTACAGGAAGAAGAGCATCGATGCCACCCACCCCACACAC |
| | | CCAGCCAACAGACCTGTGCAGAACAAGAACAAGGACAACAAGAAGAAGGA |
| | | ATCCCTGTTCGAGTACGACCTGATCAAAGACCGGAGATACAGCGTGGACAAA |
| | | TTTATGTTTCATGTGCCTATCACCATGAATTTTAAGTCCAATGGCTCCGAGAA |
| | | TATCAACCAGCAGGTGAAAGAGTACCTGCAGCTGGCCAACGACACCCACATC |
| | | ATTGGCATTGACAGGGGAGAGCGCCACCTGCTGTACCTGGTGGTGATCGACA |
| | | TGCATGGGAATATTAAGGAGCAGTTTAGCCTGAATGAGATCGTGAATACCTA |
| | | CAAAGGAAATATCTACCACACTAATTATCACGACCTGCTGGAGGCCCGGGAG |
| | | GAGGAGAGGCTGAAAGCCCGGCAGAGCTGGCAGACAATCGAGAACATTAAG |
| | | GAGTTGAAGGAGGGCTACCTGTCTCAGGTGGTGCACAAAATCACCCAGCTGA |
| | | TGGTGAAGTATCACGCCATCGTGGTGCTGGAGGACCTGAACATGGGATTCAT |
| | | GAGGGGCCGGCAGAAGGTCGAGAAGCAAGTGTATCAGAAGTTCGAGAAGAT |
| | | GCTGATCGACAAGCTGAATTACCTGGTGAACAAACAGGCTAATATTACAGAG |
| | | GCCGGGGGGCTGCTGAATGCCTATCAACTGACCTCAAAATTTGACAGTTTTC |
| | | AGAAGCTGGGCAAGCAGAGCGGCTTCCTGTTCTACATTCCTGCCTGGAACAC |
| | | CTCCAAGATCGACCCCGTGACCGGCTTCGTCAACCTGCTGGATACCAGGTAC |
| | | CAGAATGTGGAGAAGGCCAAGGCCTTTTTCAGCAAATTTGACGCCATCAGAT |
| | | TCAACCAGGATAAAGACTGGTTTGAGTTCAACCTGGACTACAACAAATTTGG |
| | | GGAGAAGGCCGAGGGAACCAGAACCAGATGGACTCTGTGTACCCAGGGGAA |
| | | GAGAATATACACATTCAGAAACGAGGATAAAAATTCTCAGTGGGACAACAT |
| | | TGAGATCGATCTGACTTCCGAAATGAAATCCCTGCTGGAGCTGTACCACATC |
| | | GATATTCAGGGCAATCTGAAGGAGGCCATCAATAGCCAAACCGATAAGTCCT |
| | | TCTTTACAAAGCTCATCCACCTGCTGAAGCTCACACTGCAGATGAGGAACTC |
| | | TATTACCCGCACAGAGACTGACTACTTGATTAGCCCCGTGGCCGACGAGGAT |
| | | GGCGAGTTCTACGACAGCAGATCCTGTGGTCCTGAGCTGCCCAAGAACGCCG |
| | | ACGCCAACGGCGCATACAACATTGCTAGAAAAGGCCTGATGCTGATCAGGC |
| | | AGATCAAGGAGGCAAAAGAGCTGGATAAGATCAAGTTCGATATCTCTAACA |
| | | AAGCCTGGCTGAATTTCGCCCAGCAGAAACCATACAAGAATGACTGA |
| 194 | 154 | ATGGCTAAGATTTTCGAGGATTTCAAGCGGCTGTACCCTCTGAGCAAGACAC |
| | | TGAGATTCGATGCTAAGCCCGTGGGCGCTACCCTGGACAACATAGTGAAAAG |
| | | CGGCCTGCTGGAGGAAGACGAGCACAGGGCCGCCTCCTACGTGAGAGTGAA |
| | | GAAGCTCATTGACGAGTACCACAAGGTGTTTATTGACCGGGTCCTCGACAAT |
| | | GGGTGTCTGCCCCTGGAGAACAAGGGCGAAAATAATTCACTGGCCGAGTACT |
| | | ACGACTCCTATGTGTCAAAAAGCCAGAACGAGGACGCCAAGAAGGCCTTTG |
| | | AGGAAAACCAGCAAAACCTGAGATCCATCATCGCCAAGAAGCTCACAGGAG |
| | | ACAAGGCTTATGCTAACCTGTTTGGTAAGAATCTGATCGAGAGCTATAAGGA |
| | | TAAAAAAGACAAAAAAAAAATTATCGATTCTGATCTGATTCAGTTCATCAAT |
| | | ACCGCCGATTCCACCCAGCTGGATTCTATGACCCAGGTGGAGGCCAAAGAGC |
| | | TGGTGAAGGAATTCTGGGGCTTTGTGACCTATTTCTACGGCTTCTTTGACAAC |
| | | AGAAAGAACATGTACACTGCCGAGAAGAAGAGCACCGGCATTGCCTACCGG |
| | | CTGATTAACGAGAATCTTCCTAAGTTCATTGACAATATGGAGGCCTTCAAGA |
| | | AGGTGATTGCCCGCCCCGAGATACAGGCCAACATGGAAGAGCTGTACTCCGA |
| | | TTTCAGCGAGTACCTGAACGTGGAATCAATTCAGGAGATGTTCCAGCTGGAT |
| | | TACTACGATATGCTGCTGACTCAGAAGCAGATCGATGTGTATAACGCCATCA |
| | | TTGGCGGCAAGACAGACGACGAGCACGACGTGAAGATCAAGGGGATTAACG |
| | | AGTACATCAACCTCTACAATCAGCAGCACAAGGACACCCGGCTGCCTAAGCT |
| | | GAAGGCCCTGTTTAAACAGATTCTGTCCGACAGGAATGCCATCTCCTGGCTG |
| | | CCCGAGGAGTTTAACAGCGATCAGGAGGTGCTGAATGCTATCAAGGATTGTT |
| | | ACGAGCGGCTGTCTGAGAACGTGCTGGGAGATAAAGTGCTGAAGTCACTGCT |
| | | GGGCAGCCTGGCCGATTACTCACTGGAGGGCATCTTCATCAGAAACGACCTC |
| | | CAGCTGACCGATATCAGCCAGAAGATGTTTGGCAACTGGGGTGTTATCCAGA |
| | | ACGCTATCATGCAGAATATCAAACATGTGGCCCCTGCCCGGAAACACAAGGA |
| | | GTCCGAGGAGGAGTACGAGAAACGGATTGCCGGCATCTTTAAGAAGGCAGA |
| | | CTCCTTTAGCATTTCCTATCTGAACGATTGCCTGAATGAGGCCGACCCCAATA |
| | | ATGCATACTTCGTGGAGAATTACTTCGCTACTTTTGGCGCCGTGAACACCCCA |
| | | ACAATGCAGCGGGAGAACCTGTTCGCTCTGGTGCAGAACAAGTACACAGAG |
| | | GTGGCTGCCCTGCTGCACTCTGATTACCCAACCGCAAAGCACCTGGCCCAGG |
| | | ATAAGGCTAACGTGGCCAAGATCAAGGCCCTGCTGGACGCTATCAAGAGCCT |
| | | GCAGCATTTCGTGAAACCTCTGCTGGGAAAGGGTGATGAGAGTGACAAGGA |
| | | CGAGCGCTTCTACGGCGAGCTGGCCAGCCTGTGGGCCGAGCTGGAGACTGTG |
| | | ACACCTCTGTACAATATGATCCGCAATTACATGACAAGAAAGCCCTACTCTC |
| | | AGAAGAAGATTAAGCTGAACTTCGAGAATCCCCAGCTGCTGGACGGGTGGG |
| | | ACGCAAACAAGGAGAAGGATTATGCCACCATCATCCTTAGACGGAATGGCCT |
| | | GTACTACCTGGCCATCATGGGAAAGGACTCAAAGAACCTGCTGGGGAAGGC |
| | | TATGCCCAGCGACGGAGAGTGCTATGAGAAGATGGTGTACAAGCAGTTCGA |
| | | CATTTCCAAGCAGCTGCCAAAATGCACCACAGAGCTGAAACACGTGAGGAA |
| | | GGCTCTGGTGGAGGACGCCAAGAGAAGCTGCCTGCTGAGCGACTTCAATAAT |
| | | TGGAACAAGCCACTGAACGTGACTAGGAAGCTGTGGGAGCTGAACAATTTC |
| | | GTGTGGGACAAGAAGAAAGAGGATTGGGTGCTGAGAAAGAAGGATAACGA |
| | | GACCAGACCAAAGAAGTTTCACAAAAAGTACCTGGAGCTGACCAGCGACAA |
| | | GAAGGGCTACAACCAGGCAAAGAATGACTGGATCAAGTTCACCAAGGAGTT |
| | | CCTGAGCAGCTATAAAAAGGTGGAGGCATACGACATCCACTATAAGAAAAG |
| | | GTACAATTCTGTGGACGAGCTGTACAAGCAGCTGAACGGGGACCTGTATGCA |
| | | ATCTCTTTCACATACGTGAGCGCTTCTTTCATTGAACAGCTGGTGTCTGAAGG |
| | | AAAGATGTACCTGTTCCAAATCTACAACAAGGACTTCAGTGAGTACTCCAAG |
| | | GGAACTCCCAATATGCATACACTGTATTGGAAGGCTCTCTTTGACGAGAGGA |
| | | ATCTCGCCGATGTGGTGTACAAACTGAACGGGCAGGCAGAAATGTTCTACCG |
| | | CAAGAAATCTATCGAGAACACCCACCCAACCCATCCAGCCAATCATCCAATC |
| | | CTGAATAAGAATAAGGATAACAAAAAGAAGGAGAGTCTGTTTGATTACGAT |
| | | CTGATTAAGGACAGAAGGTACACAGTGGACAAGTTTATGTTTCATGTTCCTA |
| | | TCACCATGAATTTTAAGAGCAGCGGGAGCGAGAACATCAACCAGGACGTGA |
| | | AGGCATACCTGAGACATGCCGACGATATGCACATCATCGGTATCGATAGAGG |
| | | CGAGAGACATCTGTTGTACCTGGTGGTGATCGACCTGCAGGGCAACATCAAA |
| | | GAGCAGTACTCACTGAATGAGATCGTGAACGAATATAACGGCAACACATAC |
| | | CACACCAACTACCATGATCTGCTGGACGTGCGGGAAGAGGAGCGGCTGAAG |
| | | GCCCGGCAGAGCTGGCAGACCATTGAAAACATCAAAGAGCTGAAGGAGGGC |
| | | TACCTGAGCCAGGTGATCCATAAGATCACCCAGCTGATGGTGAAATACCACG |
| | | CAATCGTGGTGCTCGAAGACCTGAACATGGGGTTCATGAGAGGCCGCCAGA |
| | | AGGTGGAGAAACAGGTGTACCAGAAGTTCGAGAAGATGCTGATCGATAAGC |
| | | TCAATTACCTGGTGGATAAGAAGGCTGACGCTTCCGTTTCCGGCGGACTGCT |
| | | GAATGCCTACCAGCTGACCTCTAAGTTTGATTCCTTCCAGAAAATGGGGAAG |
| | | CAGAGCGGATTTCTGTTTTACATCCCCGCTTGGAATACCAGCAAGATCGACC |
| | | CTGTGACCGGATTCGTGAACCTGCTGGATACCCGGTATCAGAACGTGGAAAA |
| | | GGCCAAAGTGTTCTTCAGTAAGTTTGACGCCATCAGGTACAACAAGGATAAG |
| | | GATTGGTTCGAATTTAACCTGGATTATGACAAGTTTGGAAAGAAGGCCGAGG |
| | | GGACCAGAACAAAATGGGCTCTGTGCACCAGGGGCATGAGGATCGACACTT |
| | | TCCGCAACAAAGAGAAGAACTCTCAGTGGGATAACCAGGAGATTGATCTGA |
| | | CAGCCGAGATGAAGAGCCTGCTGGAGCACTACTACATCGACATTCACGGCAA |
| | | CCTCAAGGACGCCATCTCCGCCCAGACCGATAAGGCTTTCTTTACCGGGCTG |
| | | CTGCATATTCTGAAGCTGACACTGCAGATGAGGAACTCCATTACCGGGACCG |
| | | AGACCGACTATCTCGTGAGCCCCGTGGCCGACGAAAATGGGATCTTCTACGA |
| | | CAGTAGGAGCTGCGGGGACGAGCTGCCAGAGAACGCCGATGCCAATGGTGC |
| | | TTATAATATCGCCAGGAAGGGCCTGATGATGATCGAGCAGATCAAAGACGCC |
| | | AAGGACCTGAACAACCTGAAATTCGATATCTCTAACAAGGCGTGGCTGAACT |
| | | TCGCCCAGCAGAAGCCCTATAAGAACGGATGA |
| 195 | 155 | ATGGAGTTTAACGATTTCAAGCGCTTGTATCCCCTGAGCAAGACCCTGAGGT |
| | | TCGAGGCCAAGCCTATCGGCGACACCCTGAAGAACATCATCAAGAATGGCCT |
| | | GCTGGAGGAGGACGAGCACAGGGCCCAGAGCTATGTGAAAGTGAAGAAGCT |
| | | GATTGACGAGTACCACAAAGTGTTCATCGACCGTGTGCTGAATGACGGATGC |
| | | CTGACCATCGAAAACAAGGGAAAAAAGGATTCTCTGGAGGAGTATTATGAG |
| | | TCCTATATGTCCAAGTCCAATGATGAGAATGTGTCTAAGACATTCAAGGACA |
| | | TCCAGGAAAACCTGCGCTCTGTGATCGCCAACAAGCTGACCAAGGACAAAG |
| | | GCTACGCCAACCTGTTTGGAAATAAGCTGATCGAGTCCTATAAGGATAAGGA |
| | | CGATACAAAGAAGATCATTGATAGCGACCTGATCCAGTTTATCAATACCGCC |
| | | GAGCCTAGCAATCTGGACTCAATGTCCCAGGATGAGGCAAAGGAGCTGGTTA |
| | | AAGAGTTCTGGGGCTTTACCACCTATTTCGAAGGGTTCCACAAGAACAGAAA |
| | | GAATATGTACACCTCAGAAGAAAAGAGTACCGGAATCGCCTACAGGCTGGT |
| | | GAACGAAAACCTGCCTAAGTTTATCGATAATATGGAGGCCTTCAAGAAGGCO |
| | | ATCGCCAAGCCCGAGATCCAGGCTAATATGGAGGAGCTCTATAGCAATTTTG |
| | | CTGAGTACCTGAACGTGGAATCCATCCAGGAAATGTTTCAGCTGGACTACTA |
| | | CAATATGCTGCTGACCCAGAAGCAGATTGACGTGTACAACGCCATCATCGGC |
| | | GGCAAGACCGACGAAGACCACGACGTGAAGATCAAGGGCATCAACGAATAC |
| | | ATCAACCTGTACAATCAGCAGCACAAAGATGAGAAACTGCCCAAGCTGAAA |
| | | GCACTGTTTAAGCAGATCCTGAGTGACCGGAACGCCATCAGTTGGCTGCCTG |
| | | AAGAATTTAACTCCGATCAGGAAGTGCTGAACGCAATTAAGGATTGTTACGA |
| | | GCGCCTGAGCGAGAACGTGCTGGGAGACAAGGTGCTGAAGAGCCTGCTGTG |
| | | CAGCCTCTCTGACTACAACCTGGATGGCATCTTCGTGAGAAATGACACCCAG |
| | | CTGACCGATATAAGCCAGAAAATGTTTGGCAATTGGTCTGTCATTCAGAATG |
| | | CCATCATGCAGAACATTAAGAAAAAGAAACTGGCCCGGAAAAGAAAAGAAT |
| | | CTGAGGAGGATTATGAGAAGAGAATCCCTGATATTTTTAAGAAGGCCGACTC |
| | | TTTCAGCATCCAGTACATTAACGACAGCCTCAATAAAATGGACGATAATAAC |
| | | CTGCACGCAGTTGATGAATATTTTGCGACACTGGGCGCTGTGAACACACCAA |
| | | CAATGCAGCACGAAAATCTCTTCGCCCTGATCCAGAACGCCTACACCGACAT |
| | | CTCCGACCTGCTGGACACACCATACCCAGAGAATAAGAACCTGGCCCAGGAT |
| | | AAGACAAATGTGGCTAAGGTGAAGGCCCTGCTCGACGCCATTAAGAGCCTGC |
| | | AGCACTTCGTGAAGCCCCTTCTGGGCAAGGGCGATGAAAGCGACAAAGATG |
| | | AGCGCTTCTACGGCGAACTGGCCAGCCTATGGACCGAGCTGGACACCGTGAC |
| | | ACTGCTGTTTAACATGGTGCACAATTACATGACCAGAAAACCCTACTCTCAG |
| | | AAGAAGATCAAGCTGAACTACAAAAACACCCAGCTGCTGGCTGGCTGGGAT |
| | | GCGAACAAAGAGAAAGAGCACGCCGCCATCATCCTGCGGAGAAACGGTATG |
| | | TATTACATCGCCATCATGGACAAAGACTCCAAGAATCTGCTGGATAAAGCTA |
| | | TGCCCAGTGACGGCGAGTGCTACGAAAAGATGGTGTATAAGCAGTTTGATAT |
| | | TTCAAAGCAGCTGCCTAAGTGCACAACTGAGCTGAAACGCGTCCGCAAGGCC |
| | | CTGATAGAGGACGCCAAGCGGTCTTGCCTGCTGTCCGACAGCAAAGATTGGA |
| | | ATAAGCCTCTCAATGTGACCAGGAAGCTGTGGGAGCTCAATAACTATGTGTG |
| | | GGACAAGAAGAAAGCCGACTGGGTGCTCAGGAAGAAGGAGAATGAGACTA |
| | | GACCAAAGAAGTTCCACAAAAAGTACCTGGAGCTCACCAGCGACAAGAAGG |
| | | GGTATAACCAGGCCAAAAACGACTGGATCAAGTTCACCAAGGAATTCCTGTC |
| | | AAGCTATAAGAAAGTGAAAGACTACGATATTCACTACAAGAAGCGATACAA |
| | | CTCAGTGGACGAGCTGTACAAACAGCTGAACTCTGATTTTTACACCATCTCCT |
| | | TCACCTATGTGTCTGTGAGTTTCATTGACAAGCTGGTCAATGAAGGCAAAAT |
| | | GTACCTGTTCCAGATCTACAACAAGGATTTCAGCAATTACAGTAAGGGCACA |
| | | CCAAATATGCACACCCTGTACTGGAAAGCCCTGTTCGATGAGCGGAACCTGG |
| | | CCGACGTGGTGTATAAGCTCAACGGAGAGGCAGAGATGTTTTATCGGAAGA |
| | | AGAGCATCAACAACACCCACCCAACCCATCCCGCCAACCACCCCATCCAGAA |
| | | CAAAAACAAGGACAACAAAAAAAAGGAAAGCGTGTTTGAGTACGACCTGGT |
| | | GAAAGATTACCGGTACACCGAGGACAAGTTCCTGTTCCATGTGCCAATCACC |
| | | ATGAATTTCAAGAGCGTGGGTTCTGAGAACATCAATCAGCAGGTGAAGGAAT |
| | | ACCTGCAGCAGGCCGACGACACTCACATCATCGGCATCGACAGGGGCGAGC |
| | | GCCACCTGCTGTACCTCGTGGTGATCGACATGGAGGGGAATATCAAGGAGCA |
| | | GTTTAGTCTGAACGAAATTGTGAACGAGTATAACGGCAATACATATCGGACT |
| | | AACTACCACGACCTGCTGGACGTGTGCGCAGATAAGCGGCTGAAGGCTAGCC |
| | | AGAGCTGGCAGACAATCGAGAACATCAAGGAGCTTAAGGAGGGATACCTCA |
| | | GCCAGGCCATTCACAAGATTACTCAGCTGATGGTGAAGTACCATGCCGTCGT |
| | | GGTGCTGGAAGACCTGAACAAAGGCTTCATGAGAGGGGGGCAGAAGGTGGA |
| | | GAAGCAGGTGTATCAGAAGTTCGAGAAGATGCTGATCGATAAGCTGAACTA |
| | | CCTGGTGGACAAAAAGGCCGACGCTGCCCAGAGCGGCGGGCTGCTGAATGC |
| | | TTATCAGCTGACCTCCAAGTTCGACTCATTCCAGAAGCTGGGAAAGCAGAGT |
| | | GGCTTTCTGTTCTATATCCCTGCCTGGAACACTAGCAAGATTGATCCTGTGAC |
| | | AGGCTTCGTGAACCTGTTCGACACCAGATACACCAACGCCGACAAGGCCCTC |
| | | AAATTCTTCTCAAAATTTGACGCCATCAGATACAACGAGGAGAAGGACTGGT |
| | | TCGAGTTCGAGTTCGACTACGACGAGTTCACCCAGAAAGCCCACGGGACCAG |
| | | AACCAAGTGGACTCTGTGCACATATGGCATGAGGCTGTGTTCCTTTAAAAAT |
| | | CCCGCCAAACAGTATAATTGGGACTCCGAAGTGGTGGCCCTGACAGACGAGT |
| | | TCAAGAGGATCCTGGGAGAGGCAGGCATCGATATTCACGAGAACCTGAAGG |
| | | ACGCAATCTGCAATCTGGAGGGCAAATCCCAGAAGTACCTGGAGCCCCTGAT |
| | | GCAGTTCATGAAACTGCTGCTGCAGCTGCGGAATTCCCGCAAGAACCCCGAG |
| | | GAGGATTACATCCTGTCCCCCGTGGCCGATGAGAACGGCGTGTTTTATGACT |
| | | CCAGAAGCTGTGGCGACAAGCTGCCTGAGAACGCAGACGCCAACGGCGCAT |
| | | ACAACATTGCCCGGAAGGGCCTGATGCTGATCAGACAGATTAAAAAGGCCA |
| | | AGGAGCTGGATAAGGTGAAATTCGATATTAGCAACAAGGCCTGGCTGAACTT |
| | | TGCCCAGCAGAAGCCATACAAGAACGAATGA |
| 196 | 156 | ATGGAATTCAACGACTTCAAACGCCTGTACCCTCTGTCTAAGACACTGAGGT |
| | | TCGAGGCTAAGCCCATCGGTAGCACACTGAACAATATCATCAAATCCGGCCT |
| | | GCTGGAAGAGGACGAGCACCGCGCTCAGTCCTATGTGAAGGTGAAGAAGCT |
| | | GATCGATGAGTACCATAAGGTGTTCATCGACCGGGTGCTGGATGACGGCTGC |
| | | CTTACCATCGAGAACAAGGACAAGAAGGATTCCCTGGAGGAATATTACGAA |
| | | TCCTATATGTCCAAGTCTAACGACGAGAACGTGAGCAAGACATTTAAGGAGA |
| | | TTCAGGAAAACCTGCGCTCTGTGATCGCTAAGAAGCTCACCGACGATAAAGC |
| | | CTACGCCAATCTGTTCGGCAAGAACCTGATTGAAAGCTATAAAGATAAGGAC |
| | | GATAAGAACAAGATTATCGATTCTGACTTGATCCAGTTCATTAATACAGCCG |
| | | AGCCTTCTCAGCTCGACTCTATGTCTCAGGACGAGGCCAAAGAGCTGGTGAA |
| | | GGAGTTCTGGGGCTTTACCACATATTTCGTGGGATTTTTTGACAACAGAAAG |
| | | AACATGTACACCTCCGAGGAGAAGTCTACCGGCATTGCCTACAGACTGGTGA |
| | | ACGAAAACCTGCCAAAGTTTATCGATAACATGGAGGCCTTCAAGAAGGCCAT |
| | | CGCCAAACCTGAGATCCAGGCAAACATGGGCGAACTGTATAGCAACTTCGCC |
| | | GAATATCTGAATGTGGAAAGCATCCAGGAGATGTTCCAGCTGGACTACTACA |
| | | ACATGCTCCTGACACAAAAGCAGATCGACGTGTACAATGCCATCATTGGGGG |
| | | CAAAACAGATGAGGAGCATGACGTTAAGATCAAGGGCATCAATGAATACAT |
| | | CAACCTGTACAATCAGCAGCACAAGGACGAGAAGCTGCCCAAACTGAAGGC |
| | | CCTGTTCAAGCAGATTCTGAGCGACAGAAATGCCATTAGCTGGCTGCCAGAG |
| | | GAATTCAATAGTGATAAAGAGGTCCTGAACGCTATCAAGGACTGTTATGAGA |
| | | GGCTGAGCGAGAATGTGCTGGGGGACAAGGTGCTGAAATCCCTGCTCTGCAG |
| | | CCTGAGCGACTATAACCTCAACGGCATTTTTGTGCGCAATGACCTGCAGCTC |
| | | ACAGACATTAGCCAGAAGATGTTCGGCAATTGGAGCGTGATCCAGAACGCC |
| | | ATTATGCAGAACATTAAAAACGTGGCCCCAGCACGCAAGAGAAAGGAGAGT |
| | | GAGGAAGATTACGAGAAGCGCATCAGCGATATCTTCAAGAAGGCCGACAGT |
| | | TTCTCCATCCAGTACATCAACGATTGCCTGAATGAGATGGACGATAATAACC |
| | | TGCACGCCGTGGATGGCTACTTTGCCACCCTGGGCGCCGTGAACACTCCAAC |
| | | TATGCAGCGGGAGAATCTGTTTGCCCTGATCCAGAATGCTTATACAGACATT |
| | | TCCAACCTGCTGGACACACCCTATCCCGAGAACAAAAATCTGGCTCAGGATA |
| | | AAACCAATGTGGCCAAGGTGAAAGCCCTGCTGGACGCCATTAAGAGCCTCCA |
| | | GCACTTTGTGAAGCCTCTGCTGGGCATGGGCGACGAGTCAGACAAGGACGA |
| | | GAGGTTCTACGGCGAGCTGGCCTCCCTCTGGACCGAACTGGACACTGTGACC |
| | | CCCCTGTATAACATGATCCGCAACTACATGACCCGCAAACCCTATAGCGAAA |
| | | AGAAAATCAAGCTCAACTTTGAGAACCCCCAGCTGCTGGGCGGCTGGGACGC |
| | | CAACAAGGAGAAAGACTACGCCACAATCATCCTGCGCAGGAACGGGATGTA |
| | | CTATCTGGCAATCATGAACAAGGACAGCAAAAAACTGCTGGGGAAGACCAT |
| | | GCCTTCTGATGGGGAGTGCTATGAGAAAATGGTGTACAAGTTTTTCAAGGAT |
| | | GTGACCACCATGATCCCTAAGTGTAGCACCCAGCTGAAGGACGTGCAGGCCT |
| | | ACTTTAAGGTGAACACCGATGATTTCGTGCTGAATAGCAAAGCCTTTAACAA |
| | | GCCTCTTACTATCACAAAAGAGGTGTTCGATCTGAATAACGTGCTGTACGGC |
| | | AAATTCAAGAAATTCCAGAAGGGGTATCTGTCCGCCACCGGCGACACCGCCG |
| | | GCTACACACATGCCGTGAACGTCTGGATTAATTTTTGCATGGACTTTCTGAAT |
| | | TCCTATGAAAGCACATGTATGTACGACTTCACAAGCCTGAAGAGCGAGAGCT |
| | | ATCTGTCCCTGGACGCCTTCTATCAGGACGCCAACCTGCTGCTGTACAAACTG |
| | | TCCTTCACCAACGTGTCTGTTTCTTTTATCGACAAACTGGTGGATGAGGGCAA |
| | | GATGTACCTGTTTCAGATCTACAACAAGGATTTCAGCGACTACAGCAAGGGT |
| | | ACACCTAACATGCATACTCTGTATTGGAAAGCACTGTTTGATGAACGGAACC |
| | | TGGTCGACGTGGTGTACAAGCTGAATGGACAGGCCGAGATGTTCTACCGGAA |
| | | AAAGTCCATCGACTACACCCATCCCACTCACCCTGCCAACCACCCCATCCAG |
| | | AACAAGAACAAGGATAATAAAAAGAAGGAGTCTGTGTTCGAATACGATCTG |
| | | GTGAAGGACAGGCGGTACACGGTGGATAAGTTCCTGTTTCACGTCCCAATCA |
| | | CAATGAACTTTAAGAGCGTGGGCTCTGAGAATATCAACCAGCAGGTGAGAG |
| | | AGTATCTCCAGCAGGCCGATGACACACACATTATCGGCATCGACAGGGGCGA |
| | | GCGCCACCTCCTGTACCTGGTGGTGATCGACATGCAGGGCAACATCAAAGAA |
| | | CAGTTCACCCTGAACGAGATCGTGAACGAGTACAACGGAAACACATATAGG |
| | | ACTAACTATCATGACCTTCTGGACACACGGGAGGAAGAAAGACTGACAGCC |
| | | AGACAGAGCTGGCAGACCATCGAGAACATCAAGGAGCTGAAGGAGGGGTAC |
| | | CTGTCCCAGGTGATCCACAAGATCACCCAGTTGATGGTTAAGTACCACGCAG |
| | | TGGTGGTGCTGGAGGATCTGAACAAGGGGTTCATGAGAGGCCGCCAGAAGG |
| | | TGGAGAAACAGGTGTACCAGAAATTCGAAAAGATGCTGATCGACAAACTGA |
| | | ACTACCTGGTGGACAAGAAGGCCGACGCAACTCAGAGCGGAGGGTTGCTGA |
| | | ACGCATACCAGCTGAAGAGCAAGTTCGACAGCTTCCAGAAGCTGGGCAAGC |
| | | AGTCAGGGTTTCTGTTCTACATTCCAGCTTGGAACACCAGCAAGATCGACCC |
| | | CGTGACAGGCTTCGTGAACCTGCTTGACACCAGATACCAGAACACTGAGAAG |
| | | GCCAAGGCTTTCTTCTCCAAGTTCGATGCCATCCGCTACAATGCCGACAAAG |
| | | ATTGGTTCGAATTCAATTTGGACTATGATAAGTTCGGAACAAAGGCCGAGGG |
| | | AACACGTACAACCTGGACCCTGTGCACCCAGGGCAACCGCATCTGCACATTT |
| | | AGAAATGCAGAGAAGAACTCCCAGTGGGACAACCAGGAGATTGACCTGACA |
| | | AGAGAAATGAAGTCTCTGTTCGAGCACTATCACATCAACATCTGTGGCAATC |
| | | TGAAGGAGGAAATTTGCTCCCAGACCGACAAAGCCTTCTTCACCGGGCTGCT |
| | | GCACATCCTGAAACTCACCCTGCAGATGAGGAACAGCATTACCGGCACCGAG |
| | | ACCGACTATCTGGTGTCCCCTGTGGCCGACGAAAATGGCGTGTTTTATGACA |
| | | GCAGAAGCTGCGGGGATATGCTGCCCAAGAACGCCGACGCTAATGGCGCTT |
| | | ACAACATTGCTCGCAAAGGCCTGATGCTGATCGGCCAGATCAAGGAGACTAA |
| | | GGACCTGGCCAACTTCAAATACGACATCAGCAACAAAGCCTGGCTGAACTTT |
| | | GCCCAGCAGAAACCATATAAGAATGAGTGA |
| 197 | 157 | ATGGACAAGAAGTTCGAGGATTTCAAGAGACTGTACCCCCTGAGTAAAACCC |
| | | TGCGGTTCGAGGCTAAACCAATTGGCTCTACCCTGGATAACATCATTAAAAG |
| | | CGGCCTGCTGGACGAAGATGAGCACAGGGCCGTGTCATACGTGAAGGTGAA |
| | | GAAGTTGATCGACGAGTACCACAAATCCTTTATAGACAGAGTGCTGGATGAG |
| | | GGCTGCCTGCCATTTGAAAACAACGGGGAGAAAGACAGCCTGGAGGAGTAG |
| | | TACGAATCATATAAACTGAAAAGTAACGACGAGAACGCTAACAAGACCTTT |
| | | AAGGAAATCCAGCAGAACCTGAGGTCTGTGATCGCCAATAAGCTGACCGAC |
| | | GATAAAGCATACGCCAATCTGTTTGGCAACAAGCTGATCGAATCTTACAAGG |
| | | ATAAGGAGGATAAAAAGAAGACCATTGACTCTGACCTGATCCAGTTCATCAA |
| | | CACAGCCGAACCATCTCAGCTGGACTCTATGAGCCAGGATGAGGCCAAAGA |
| | | GCTGGTGAAAGAGTTCTGGGGATTCACAACCTACTTCGTGGGCTTTTTCGAC |
| | | AATAGGAAAAATATGTACACATCAGAGGAGAAGAGCACCGGGATCGCCTAC |
| | | CGCCTGGTGAATGAGAACCTGCCCAAGTTTATCGACAATATGGAAGCCTTCA |
| | | AGAAAGTGATCGCAAAAAGCGAAATCCAGGCCAACATCGAAGAGCTGTACT |
| | | CCAATTTTGCCGAGTACCTGAACGTTGAATCTATCCAGGAGATGTTTCAGCTC |
| | | GACTACTACAACATGCTGCTGACTCAGAAGCAGATCGACGTTTACAACGCCA |
| | | TCATCGGCGGCAAAACAGACGAGAAGCACGACGTGAAGATCAAGGGCATAA |
| | | ACGAGTACATTAATCTGTATAACCAGCAGCACAAGGATGAGAAGCTGCCTAA |
| | | ACTGAAAGCCCTGTTCAAGCAGATCCTGTCAGATCGGAATGCTATTTCATGG |
| | | CTGCCCGAGGAATTCAACGATGATCAGGAGGTGCTGAACGCTATCAAAGACT |
| | | GTTATGAACGGCTGAGCGAGAACGTGCTCGGCAACAAGGTGCTGAAGAGTC |
| | | TGCTGTGTTCCCTGGCCGATTACAACCTGGACGATATTTTTATTCGGAACGAC |
| | | CTGCAGCTGACAGACATCAGCCAGAAAATGTTTGGCAACTGGAGCGTGATCC |
| | | AGGACGCCATCATCCAGAACATCAAAAACGTGGCCCCCGCAAGAAAGAGGA |
| | | AAGAGAGCGAAGAGGACTACGAGAAGAGAATTTCCGGAATCTTTAAGAAAG |
| | | CCGACAGCTTCTCCATTCTGTACATCAACAGCTGTCTGAATGAGATGGACGA |
| | | TAACTCACTGCATGCCGTGGACGGCTACTTTGCCACTCTCGGAGCCGTGAAG |
| | | ACACCCACCATGCAGCGCGAGAATCTGTTTGCTCTGATCCAGAACGCTTATA |
| | | CGGACATTTCCGATCTTCTGAACACCAAGTACCCCGCCAACAAAAATCTGGC |
| | | CCAGGACAAAACTAATGTGGCCAAGGTGAAGGCCCTGCTGGACGCTATCAA |
| | | GTCCCTGCAGCACTTCGTGAAGCCACTGCTGGGGAAGGGCGACGAATCCGAT |
| | | AAAGACGAGAGATTCTATGGGGAGCTGGCCTCTTTGTGGACCGAGCTGGACA |
| | | CCGTGACACCTCTGTACAACATGATCAGGAATTACATGACACGGAAACCATA |
| | | TAGCGAGAAGAAAATTAAGCTGAACTTCGAGAACCCTCAGCTGCTGGGGGG |
| | | GTGGGACGCCAATAAGGAGAAGGATTATAGCACCATTATTCTGAGACGGAA |
| | | CGGCATGTACTACTTGGCAATTATGAACAAGGATTCCCGGAGGCTGCTCGGA |
| | | AAGGCCATGCCAAGCGATGGGGAATGTTATGAGAAGATGGTGTACAAGCTG |
| | | CTTCCTGGCGCCAACAAAATGCTGCCAAAGGTGTTCTTTGCTAAGTCCAGAA |
| | | TCGACGACTTCAAGCCCAATATCCAGATCGTGGAGAACTATAACAACGGCAG |
| | | TCACAAAAAACGGAAGAATTTCAACATACAGGATTGCCACGACCTGATCGAC |
| | | TTCTTTAAGCAGAGCATTAAAAAGCACGAGGACTGGTCTAAATTCAGCTTCA |
| | | ACTTTAGCGATACTTCTACCTACGAGGACCTGTCCGGGTTTTACAGAGAAGT |
| | | GGAACAGCAGGGGTACAAGCTCTCCTTTATGAATGTCAGCGTGTCCTTCATC |
| | | GATAAACTCGTGGACGAGGGCAAGATGTACCTGTTTCAGATTTACAACAAGG |
| | | ACTTCAGCGAGTATTCCAAGGGCACCCCAAACATGCACACACTCTACTGGAA |
| | | GGCCCTGTTCGACGAGCGCAACCTGGCTGACGTGGTTTACAAGCTGAACGGC |
| | | CAGGCCGAAATGTTCTATCGGAAGAAATCCATAGACTACACCCATCCAACCC |
| | | ACCCCGCAAACCACCCGATCCTGAACAAGAATAAGGACAACAAGAAGAAGG |
| | | AGTCCCTGTTTGAGTACGATCTGATTAAAGACCGCAGATACACCGTGGACAA |
| | | ATTCCTGTTCCACGTGCCAATCACCATGAACTTTAAGAGCGTGGGCTCAGAA |
| | | AACATCAACCAGCAGGTCAGAGAGTATCTGCAGCAGGCCGACGACACCCAC |
| | | ATCATCGGCATCGATAGGGGAGAAAGACACCTGCTGTACCTGGTGGTGATTG |
| | | ACATGCAGGGAAACATCAAGGAGCAGTTTACACTGAATGAGATCGTGAACG |
| | | AGTACAATGGGAACACCTATCGCACCAACTATCACGACCTGCTGGATATTAG |
| | | AGAGGAGGAGCGGCTGGCCGCTCGCCAGTCTTGGCAGACCATCGAGAACAT |
| | | CAAGGAGCTGAAGGAAGGATACCTGAGCCAGGTGATCCACAAGATCACCCA |
| | | GCTGATGGTGAAGTACCACGCTATCGTAGTGCTGGAGGACCTGAACATGGGC |
| | | TTCATGAGGGGGAGACAGAAAGTGGAGAAGCAGGTGTACCAGAAATTTGAG |
| | | AAGATGCTGATCGACAAGCTGAACTATCTGGTGGATAAGAAGGCCGATGCTA |
| | | CACAGCCCGGCGGCATCCTGAACGCCTACCAGCTGACTAGCAAGTTTGACTC |
| | | TTTCCAGAAGCTGGGGAAGCAGTCTGGCTTTCTGTTTTACATCCCCGCTTGGA |
| | | ATACCTCCAAGATTGACAGCGTGACTGGCTTTGTGAACCTGCTGGACACCAG |
| | | GTACCAGAACACCGAGAAGGCCAAAGTGTTCTTCTCAAAATTTGACGCCATC |
| | | CGGTACAATGAGGAAAAGGATTGGTTCGAATTCTACCTGGACTACGACAAGT |
| | | TCGGTTCCAAGGCCGAAGGGACCAGAACCAAGTGGACCCTGTGCACCCAGG |
| | | GCAAGAGAATCAGGACATTCAGAAACCCAGACAAGAACTCTCAGTGGGACA |
| | | ACCAGGAGGTGGACCTGACCAGAGAGATGAAGAGCCTGTTTGAGCACTACC |
| | | ACATCAACATCTGCGGCAATCTGAAGGAGGAGATCTGCAGCCAGACCGACA |
| | | AAGCCTTTTTCACAGGTCTGCTCCATGTGCTGAAGCTGACCCTGCAGATGCGC |
| | | AATAGCATCACCGGGACCGAGACAGACTACCTGGTGAGCCCTGTCGCCGATG |
| | | AGGAGGGCAACTTTTATGACAGCCGCTACTGCAACATCACCCTGCCAAAGAA |
| | | TGCCGACGCCAACGGTGCCTACAATATCGCTAGAAAGGGCCTGATGCTCGTG |
| | | AAGCAGATCAAAGCCGCCACAGACCTGGCCAACTTTAAGTACGATATCTCTA |
| | | ACAAGGCCTGGCTGAATTTCGCCCAGCAGAAGCCCTATAAGAATGAATGA |
| 198 | 158 | ATGAAGAAATCCTCACTGCAGGATTTTACAAATCAGTACAGCCTGTCAAAAA |
| | | CCTTGAGATTCGAGCTGATTCCCCAAGGAGAAACCTTGGAGCACATTGAGAA |
| | | AAACGGACTGTTAAGCCAGGACGAACATCGAGCTGAGTCTTATATTATCGTG |
| | | AAGAAGATCATCGATGAGTATCACAAGGCCTTCATAACCAAAGCCCTGGACG |
| | | GGGTGAAACTAAATTCACTGGAGGACTACTTCCTATACTACCAGCTGCCTAA |
| | | ACGGGACGAGGAGCAAAAGAAGAAATTCGAGGAAATTCAGACCAAGTTAAG |
| | | GAAACAGATCGCCGATCGATTCGCTAAACAGGAGAGCTTTAAAAATCTCTTC |
| | | GCAAAAGAGCTTATCAAGGATGACTTGATCAACTTTGTCAAGAGTAACGACG |
| | | ACAAGCTCCTGGTCGCGGAATTTCAAAATTTCACTACCTACTTCACGGGCTTC |
| | | CACGAAAACCGAAAAAATATGTACAGCGCTGAAGATAAATCAACTGCCATT |
| | | GCTTTTAGGTTGATACACCAGAACTTGCCAAAGTTCATAGACAATATGAGAG |
| | | CATTCGACAAGATAAAGATCTCTAAAGTGAAAGACAGCTTTAAGACCATACT |
| | | GGCGGACGATGAACTGGGCGCAATTATCCAGGTGATAGCCGTAGAAGACGT |
| | | GTTCACCCTTAACTACTTTAATGATACACTCACACAGTTGGGCATAGATAAGT |
| | | ATAATCAGCTCATAGGAGGGTTCACAAGCGAAGACGGTAAGATCAAGATCA |
| | | AAGGTCTGAACGAGTACATCAACCTATACAACCAAACTGCAAAGAAAGAGG |
| | | AGAGACTGCCGAAATTGAAGCCGCTCTACAAGCAAATTCTGTCCGACCGCTC |
| | | CACTGCCTCCTTCATCCCTGAGGCGTTTTCGAATGATAATGAAGTGCTGGAGT |
| | | CCATCGAGAAACTGTATCAGGAAATTAACGACTTGGTTCTCAATAAGCGGGT |
| | | AAAGGGTGAACACAGCCTTAAAGAATTGCTCCAGAGTCTAAACGAATACGA |
| | | CGTTTCCAAGGTGTACTTGAGAAATGACCTGTCACTCACTGATATCTCACAG |
| | | AAGATGTTTGGAGACTGGGGAGTATTTCAGAAAGGAATGCAGACCTGGTAC |
| | | GCCGTGAATTATAAGGGCAAGAATAAGGCCGGCACCGAAAAGTACGAGGAT |
| | | GAGCAGAAGAAATATTTCTCAAACCAGGATAGCTACAGTATTGGCTTTATTA |
| | | ACGAGTGCTTACTCCTCTTAGATACCGTGTATCAGAAGCGGATTGAGGACTA |
| | | TTTTAAATTGCTGGGAGAGAGGAATACTGAAGAGGAGAAATCCGAGAATCT |
| | | CTTCGTCCTAATTGAGAAAAACTACAACGGCATTAAGGATCTGCTTAACAAT |
| | | CCATATCCCCACGACAAAAATCTTGCCCAAGATCAGGCCAACGTGGACAAGA |
| | | TTAAGAACTTTTTAGACGTCGTGAAAACATTGCAGTGGTTTATTAAACCTCTT |
| | | CTGGGCAAGGGAAACGAGGCTGAGAAAGATGAGCGATTTTACGGTGAGTTT |
| | | ACTTCTCTATGGACCACACTGGACCAGGTGACACCCCTCTACAACAAAGTTC |
| | | GGAATTACATGACCCAAAAACCCTACTCAACCGAGAAGATTAAGCTGAATTT |
| | | TGAGAATTCCACACTCCTTGACGGGTGGGATGTTAACAAGGAGGTGGACAAT |
| | | ACTGCAATGATTTTTCGCAAGAACGGTCTTTATTATCTGGGCATCATGAACAA |
| | | GAAGCATAACAAGATTTTCAAGACCGACATCGCAAATACTGGGGGTGAGTG |
| | | CTACGAAAAGATGGAGTACAAACTGTTACCAGGGGCCAACAAAATGCTGCC |
| | | CAAAGTTTTTTTTTCAAACAGCCGTATCGATGAATTCAAGCCGGGAACAGAA |
| | | CTTCTCGAGAATTATAAGAACGAGACGCATAAGAAGGGTGATAATTTTAATC |
| | | TCAACGATTGTCACCACCTTATTGATTTCTTCAAGACCAGTATCAACAAGCAC |
| | | GAGGACTGGAAGCACTTTGGCTTCCAGTTTTCTGATACAAAAACGTACAATG |
| | | ACTTGTCTGGATTCTATAGAGAAGTGGAACAACAGGGCTATAAGATCACATA |
| | | TAAGGCAATCAGCGAAAACTACATTGCTCAAATGATCGCAGAGGGGAAACT |
| | | GTACTTGTTCCAGATCTACAATAAAGATTTCAGTCCTTACTCCAAAGGGATGC |
| | | CAAATATGCATACCCTGTACTGGAAAATGCTTTTCGACGCCGTCAATCTGAA |
| | | GAACGTTGTCTATAAGCTGAACGGGCAGGCAGAAGTGTTCTATAGGAAACTG |
| | | TCTATCAAAGCCGAAAACATTATCACACATAAGGCGAATGTGCCTATTCACA |
| | | ATAAAAATGAGGAGAACGAGAAAAAGCAACAATCCCGCTTTGATTATGATA |
| | | TAATCAAGGACAAGCGGTACACTATGGACAAATTCCAGTTCCATGTCCCTAT |
| | | TACTATGAATTTCAAGGCTAAAGGCTTGAATAACATCAACATCGAGGTAAAC |
| | | CAGTACCTTAAGAAAGAATCGGACATTCATATCATAGGAATAGACCGGGGG |
| | | GAAAGGCATCTGCTATATTTGACATTAATTGATGGCAAGGGCAACATCAAAC |
| | | AGCAATTTAGTCTCAACGAGATCATTAATGAGTATCAGGGAAAGACCTATAA |
| | | GACTAATTACCACGATTTACTCGACAAGAAAGAAGGCGACCGGGATGATGCT |
| | | CGTAGAAATTGGAAGACCATCGAGACAATCAAGGAGCTTAAGGAGGGATAT |
| | | CTCTCGCAAGTCATCCATAAAATCTCTGAACTCATGGTAGAACACAACGCTA |
| | | TAGTCGTGCTGGAAGACCTCAACATGGGCTTCATGAGGGGGCGCCAAAAAGT |
| | | TGAGAAGCAGGTGTACCAGAAGTTTGAAAAGATGCTAATCGACAAACTGAA |
| | | CTACCTGGTCGATAAGAAGAAAAACCCCACAGATCTGGGTGGCACTTTAAAT |
| | | GCTTATCAGCTGACGAACAAGTTTGAGTCTTTCCAGAAGATGGGGAAACAGT |
| | | CTGGCTTCCTCTTTTATGTCCCTGCTTGGAACACCAGTAAAATGGACCCAGTC |
| | | ACCGGGTTCGTAAACCTGCTGGACACACGCTACGAAAACATTGAAAAGGCC |
| | | AAAACGTTTTTCTCTAAATTCGATAGCATCCATTACAATCCCCTTAAGAAGTA |
| | | TGTGGAGTTCGAGTGCGACTACAATCGATTTACCACCAAAGCCGAGGGGACA |
| | | CAAACTAAATGGACGCTGTGTACGTATAAGGAAAGAATTGAAACCTTTCGTG |
| | | ACCCAACCCAGAACAGCCAGTGGAAGTCCAGGGAAATAGTTCTTACAGATG |
| | | AATTCATCAGCCTGTTTGAGCAGTACGGTATTGCTTACAAGAACAAGGAAGA |
| | | ACTGAAAGATGCAATTGCGAGGCAGACAGAGAAGGTGTTCTTTGAGCGCCTG |
| | | CTGCACCTGCTGAAACTGACTCTGCAGATGCGGAATAGTATCACAGGGACTG |
| | | AAACCGATTATCTCATAAGCCCAGTGGCAAATGCCAAAGGCGAGTTCTATGA |
| | | CTCCCGCACTGCTTCCGAAACGCTTCCCAAGAATGCCGACGCCAATGGAGCA |
| | | TATAACATCGCCAGAAAAGGCCTGTGGGTGGTTGAGCAGATTAAACAAGCC |
| | | GATGATCTGAAAAAGCTCAAGCTCGCTATCTCTAATAAGGAATGGCTGGGAT |
| | | TTGTGCAGAACTATGGGAAATGA |
| 199 | 159 | ATGGGCTGGAGAAACGGCTTCCAGAAGATCCTGATCCTGATCAACAACAAG |
| | | AAGATGGGCAATACAAATCTGTTCAAGGGATTTACAAACTTTTACCCCGTCT |
| | | CCAAAACCCTCAGATTCGAACTGAAGCCCATCGGCAAAACCCTGGAGCACAT |
| | | CGAAAAAAACGGCCTCCTGCTGCAGGATGAGCACCGCGCCGAGTCCTACGTG |
| | | ACAGTGAAGAAGATTATTGACGAATACCACAAAGCCTTTATTGCCAAAGCCC |
| | | TGGATGGCCTGGTCCTGAACGTGCTGGAGGACTATCACCTGTATTATCAACT |
| | | GCCTAAACGGGACGAGGCCCAAAATAAAAAATTCGAGGAGCTGCAGACAGA |
| | | GATGAGAAAGCAGATCGCCGATAGGTTCACAAAGCAGGACGGCTTCAAGAA |
| | | CCTGTTCGCCAAGGAGCTGATTAAGGAGGACCTGAAGGCCTTCGTCCAGACA |
| | | CTCGAGGACAGACAGCTGGTGGAGGAGTTCGGCAACTTTACCACATACTTCA |
| | | CTGGGTTTCATGAGAATAGGAAAAACATGTATAGCGCCGAGGACAAGAGCA |
| | | CCGCCATCGCCTACAGGCTGATTCACCAGAACCTGCCCAAATTCGTGGACAA |
| | | CATGAAGGCTTTCGATAAGATCAGAAATAGCGCCGTGAAGGAGAAATTCGC |
| | | CCTGATCATCTCAGATGACGAGTTGGGCCCCATCATCCAGGTGAAAGACATC |
| | | GAGGAAGTGTTCTGCCTGGATTACTTTAACGAGACCCTGACCCAGAAGGGCA |
| | | TTGACAAGTACAATCAGCTGATCGGAGGATATATGCCAGAAGACGGCAAGG |
| | | AGAAGAAAAAGGGCCTGAACGAATATATCAACCTGTTCAACCAGACCGCCA |
| | | AGAAGGAGGAGCGGATCCCTAAGCTGAAGCCACTGTATAAACAGATCCTGT |
| | | CTGACCGGAGCACAGCCTCCTTTATTCCTGAGGAGTTCGAGTGTGATAACGA |
| | | GGTGCTGGAGTCAATCGAGAAGCTGTACCAGGAGATTAACAAACACGCCCTT |
| | | CCCCAGCTGAAGGGCCTGATGAATAACCTGCACGATTTTGATCTGCACAAGA |
| | | TCTATCTGCGTAATGACCTGTCTCTGACAGACATCAGCCAGAAAATGCTGGG |
| | | CGACTGGGGAGCCTTCCAGAAGGCCATGAATAAGTGGTTTGACCTGAATTAT |
| | | AAGGGCAAGGCAAAACCCGGCACCGAGAAGTACGAGGAGGAGCAGAAAAA |
| | | GTACTTTAGGAATCACGAGTCATACAGTATCGGGTTCATCAACGATTGTCTG |
| | | GCCAAGAGCGACATTGCCGAGCACCATAAGAAAATCGAAGACTACTTTAAG |
| | | CGGGCAGGAGAGCAGATTAATGAGACCGAGAATCTCTTTACCCTGGTGGAG |
| | | AAGGGGTACTCCACCGTGAACGACTTACTGAATAACCCATACCCAAAGGAG |
| | | AAGAATTTGAGCCAGGACCAGCAGAATGTGGATAAGATTAAGGCCTTTCTGG |
| | | ACGGCATCAAGGCCCTGCAGTGGTTTATTAAGCCTCTGCTGGGCAAGGGGAA |
| | | TGAGGCCGAGAAAGACGAGAGATTCTACGGGGAGTTCGCAATGCTGTGGAC |
| | | CACCCTGGACCAGATCACCCCTCTGTACAATAAGGTGCGCAATTACATGACC |
| | | CAGAAGCCTTACTCCACCGAGAAGATCAAGCTGAATTTTGAGAATTCCTACT |
| | | TCCTGAACGGATGGGCCCAGGACTACGAATCCAAGGCCGGCCTGATCTTCAT |
| | | CAAAGACGGCAACTACTACCTGGGAATTAATAATAAGAAGCTGACAATCGA |
| | | GGAGAAGGAACTGCTGAAGGGCACGGATGCCAAGCGCATCATCCTGGACTT |
| | | CCAGAAGCCCGACAACAAGAACATCCCTAGACTGTTTATTAGGAGCAAGGG |
| | | CGACAACTTTGCCCCTGCCGTGGAAAAGTACAACCTGCCTATTAAAGATGTG |
| | | ATCGAGATTTACGACTCCGGAAAGTTCAAAACCGACTATCGGAAGACCAACG |
| | | AGGAGGATTATACCAAGAGCCTGCATAAGCTGATCGATTACTTTAAGGAGGG |
| | | GTTCAGCAAGCATGAGTCCTACAAGCATTATCCCTTTAGCTGGAAGAGCACA |
| | | ACCGAATACAAGGATATCGCAGAGTTCTACAACGATGTGGAGGTGAGCTGCT |
| | | ATCAGGTGTTTGAGGAGGGAGTGAACTGGGGGAAGATCATGGACTTCGTGG |
| | | ATCAGGGGAAGCTGTACCTGTTTCAGATCTATAATAAAGACTTTTCCCCCTAT |
| | | AGCAAGGGAACCCCTAATATGCATACCCTGTACTGGAAAATGCTGTTCGACG |
| | | CCGAGAATCTGAAGGACGTGGTGTACAAGCTCAACGGCCAGGCCGAGGTGT |
| | | TCTTCAGGAAGTCCAGCATCAAGGCTGAGAATAAGGTGGTGCATAAGGCCG |
| | | AGGGCAGCATCCCTAACAAAAACGAGCTGAATGCCAAGAAGCAGAGCACCT |
| | | TCGACTACGATATCATTAAAGACAGGCGCTACACCACCGACAAGTTCCAGTT |
| | | CCATGTGCCCATCACCATGAATTTCAAGGCCAGAGGACTGAATAACATTAAT |
| | | ACCGAGGTGAATCAGCTGATTAAGAAGGAGAATGAGATCCACATCATTGGG |
| | | ATCGATAGGGGCGAGCGCCACCTGCTGTACCTGACACTGATCGACTCAAAGG |
| | | GCAGCATTAAGCAGCAGTTTTCCCTGAACGAGATCATCAACCAGTACAATGG |
| | | CCAGAATTATAAGACCAATTATCACAATCTGCTGGACAAAAAGGAAGGCGG |
| | | CAGAGATGAGGCTCGGCGCAACTGGAAGACCATCGAAACTATCAAGGAGCT |
| | | GAAAGAAGGATATCTGTCTCAGGTGATCCACAAGATCGCAGAGCTGATGGTG |
| | | GAGTACAATGCCATCGTGGTCCTGGAGGACCTGAACATGGGATTTATGAGAG |
| | | GGCGCCAGAAGGTGGAGAAGCAGGTCTATCAGAAATTCGAAAAAATGCTGA |
| | | TTGACAAACTGAATTACCTGGTGGACAAGAAGAAAAAGGCCGGGGAATTCG |
| | | GCGGGACGCTCAAGGCCTACCAGCTGACAAACAAATTCGAGTCCTTTCAGAA |
| | | GATGGGGAAGCAGAGCGGCCTGCTGTATTACGTGCCAGCCTGGAACACCTCC |
| | | AAGATGGACCCAGTTACCGGGTTCGTTAATCTGCTGGACACACGCTATGAAA |
| | | ATATGGAGAAGGCCAAGCAGTTTTTTGGAAAGTTTGAAGCCATCTCCTACAA |
| | | GCAGACAAAGGGCTATTTCGAGTTCGAGTTTGACTACATGAAGTATACCAAT |
| | | AAGGCCGAGGGAACTAAGACCAGGTGGACCCTGTGTACCAACAACGAGAGA |
| | | ATCGAGACTTACAGGAATCCAGAAAAAAATAGCCAGTGGGACAGCAGGGAG |
| | | GTGGGACTGACCAAGGAGTTTGTGTCCCTCTTCGAGCAGTTCGGCATCAATTT |
| | | TAAAGATAACGCCGGGCTGAAGGAGGCCATTTGCAGGCAGACTGAGAAAGC |
| | | ATTTTACGAGAGGCTGCTGCACCTGCTGAAGCTGACTCTGCAAATGAGAAAC |
| | | TCTATTACCGGAACCGAGATCGACTACCTGATCAGCCCCGTGGCCAACGACA |
| | | AAGGTGAATTCTACGATAGCAGAACCGCCGCCGAGATTCTGCCACAGAATGC |
| | | CGATGCCAACGGGGCCTATAATATCGCCAGAAAAGGCCTGTGGGTTATCGAC |
| | | CAGATTAAGCAGGCCGACGATCTGAAGAAGCTGAAGCTGGCCATTAGCAAT |
| | | AAAGAGTGGCTCGGCTTCGTGCAGAAGGACGTGTGA |
| 200 | 160 | ATGAAGAACCTGACCGAGTTCACCGGCCTCTACCCTGTGAGCAAGACCCTGC |
| | | GATTTGAGCTGAAGCCCCAAGGCCGGACCCTGGAGTACATCGAAAAGAACG |
| | | GACTGCTGGAACAAGACGAACACAGAGCCAGCAGCTATATCCTGGTGAAGA |
| | | AGATCATCGACGACTACCACAAAGCCTTTATCGCTAACGCCCTCCGCGATTTT |
| | | AAGCTGTACAGCCTGGAGGATTATTACCTGTATTACAATATCCAGAAGAGAG |
| | | ACGACGAACAGAAAAAGAAATTTGAGGATATCCAGTCTAAACTGCGGAAGC |
| | | AGATCGCCGACAGATTTACCAAAGAGGAGTCTTTTAAGAACCTGTTCGCCAA |
| | | GGAATTGATTAAGGAGAACCTGATCGAGTTCGTGCAGACCGTGGAGGACCG |
| | | CGAGCTGATCAAGGAGTTTGAGAGCTTCACTACCTATTTCACCGGCTTCCAC |
| | | GAGAATAGAAAGAACATGTACTCCGCCGAGGAGAAGAGCACCGCCATCGCC |
| | | TATCGCCTGATCCACCAGAACCTGCCCAAGTTCATCGACAACATGAGGGTGT |
| | | TCGAGAAGATCGCCAATTCCCCTGTGAAGGACAAGTTCCAGACCATCCTGTC |
| | | CGACAACCAACTGGGCCCAGTCATCCAGGTGATGGCCGTGGAGGACATGTTC |
| | | CGCCTGGATTACTTTAACGAGACACTGACTCAGATCGGCATCGACAAATACA |
| | | ATTCACTGTGCGGCGGCTTTTCACCAAATGAGGGCAAGGAAAAGATCCAGGG |
| | | GCTGAATGAGTATATTAACCTGTATAACCAGACAGCTAAGAAGGAAGAGAG |
| | | AATCCCCAAGCTGAAGCCACTGTTTAAGCAGATTCTGTCTGATAGATCTACC |
| | | GCCAGCTTCATCCCTGACGAGTTCGAGAACGACTCCGAGGTGCTGGAGAGCA |
| | | TCGAGCTGTTTTATCAGGAGGTGAACGAACAGGTGATTAATAAGAACGTGGA |
| | | AGGAGAGCACTCACTGAAGGAGCTGCTGAAGAGCCTGCCCGAGTACGAGCT |
| | | GACCAAAATTTATCTCCGCAACGATCTGTCAATCACAGACATTAGTCAGAAG |
| | | ATCTTTGGAGACTGGGGCGTGTTCCAGAAGGCCATGAATACCTGGTTTGAGC |
| | | TGAATTATAACGGCAAGGCCAAGTTCGGAACCGAGAAGTACGAAGAGGAGC |
| | | AGCGGAAGTATTTTGCCAATCTGGATAGCTTCTCCATAGGCTTCATTAATGAG |
| | | TGCCTGCTGCAGCTGGATACACCCTACCACAAGAACATCGCCGACTATTTTG |
| | | CCCTCAGAGGGAAGACCGATACCGAAACCCAGGACCTGTTCGCCGTGCTGGA |
| | | GGACAAGTACAACGCCGTGACCGACCTGCTGAATAACCCCTACCCCCAGGAC |
| | | CAGGATTTAGCCCAGGACCAAAAGCAGGTGGATAAGCTGAAAGAGCTGCTG |
| | | GATGCCGTGAAGGCTATCCAGTGGTTCATTAAACCCCTTCTGGGAAAGGGCA |
| | | ACGAGGCCGACAAAGATGAGAGATTCTACGGAGAGTTCACCAGCCTGTGGA |
| | | TCACACTGGATCAGATTACACCTTTGTACAACAAGGTGAGAAACTACATGAC |
| | | CAGAAAACCCTACAGCACCGATAAGATTAAGCTGAATTTTGAGAACTCCTAT |
| | | TTTCTGAATGGCTGGGCTCAGGACTACGAGTCCAAGGCCGGGCTGATCTTCA |
| | | CCAAAGACGGCAACTATTATCTCGGCATCAATGACAAGAAGCTGAGCAACG |
| | | AGGATAAGACACTGCTGAAGAGCAACTCTGAGCTGAACCTGGCAAAGAGGA |
| | | TCGTGCTGGATTTCCAGAAACCTGATAATAAGAACATCCCCCGGCTGTTCAT |
| | | CCGGAGTAAGGGAAACAACTTTGCCCCTGCCGTGGAGAAGTACAACCTGCCC |
| | | ATTCATGAGGTCATTGAGATTTACGATAACGGCAAGTTTAAAACAGAGTACC |
| | | GCAAGATTAATGAAACAGACTACCTGAAGTCTCTGCACCTGCTGATCGACTA |
| | | CTTTAAGATTGGCTTCTCTAAGCACGAGAGCTACAAGCATTACCCCTTCTCCT |
| | | GGAAGAACACCACCGAGTACAAGGACATCGCCGAGTTTTACCACGACGTGG |
| | | AGGTGAGTTGCTACCAGGTGTTCGAGGAGAACGTGAATTGGGACACCCTGAT |
| | | GAATTTCGTGGATGAGGGGAAGCTGTATCTGTTCCAGCTGTACAACAAGGAC |
| | | TTCTCTCCCAACAGCAAGGGAACCCCAAACCTGCACACACTGTATTGGAAGA |
| | | TGCTGTTCGATGCTGACAACCTGAAAGACGTCGTGTACAAGCTGAACGGGCA |
| | | GGCCGAAGTGTTTTTTAGAAAGTCCTCCATCAAGCCCGAGAATATCGTGCTG |
| | | CATAAGGCCAACGAGGCCGTCAACAACAAGAACGAGCAGAACACAAAGAA |
| | | GCAGTCTAGATTTGAGTATGATATCATCAAGGATAAGAGATACACCGTGGAC |
| | | AAGTTCCAGTTCCACGTCCCTATCACCATGAACTTTAAGGCCAGAGGGCTCA |
| | | ACAACATTAACACCGAGGTGAACCAGTGGCTGCAGAAGAGCGATAACGTGC |
| | | ACATCATCGGCATTGACAGGGGTGAGAGGCACCTGCTGTACCTGACCCTGAT |
| | | CGACAGCAAGGGGAACATTAAACAGCAGTTCAGCCTGAACGAGATCGTGAA |
| | | TGAGTATGAGGGCAAGACCTACAAGACCGACTACCACAAACTGCTGGACAA |
| | | CAGGGAAGGGAACCGCGACGAGGCCCGGAAGAACTGGAAAACCATCGAAA |
| | | CCATCAAGGAACTGAAGGAGGGCTACCTGAGCCAGGTGATCCACAAGATTTC |
| | | TGAGCTGATGGTGGAGTACAACGCCATTGTGGTGCTGGAAGATCTGAACATG |
| | | GGCTTCATGAGGGGACGGCAGAAAGTGGAGAAGCAGGTGTACCAGAAGTTC |
| | | GAGAAGATGCTGATCGACAAGCTGAACTACCTGGTGGACAAGAAGCAGAAC |
| | | CCAGCTGAGATGGGGGGAACCCTGCATGCCTATCAGTTTACCAACAAGTTTG |
| | | AATCCTTTCAGAAGATGGGCAAGCAGTCTGGGATGCTGTTCTACGTTCCCGC |
| | | TTGGAATACTTCCAAGATGGACCCCGTGACCGGCTTCGTGAATCTGTTCGAC |
| | | ACCAGGTACGAAAACATGGAAAAGGCCAGATCCTTCATCGGCAAGTTTGAC |
| | | ACAATTCGCTACAATCCCAAGAAGGAGTACTTTGAATTTGACTTCGACTATA |
| | | ACAAATTCACCGCCAAAGCCGAGGGTACCAGAACTAGATGGACCCTGTGTAC |
| | | AAACGATACCAGGATCGAAACCTTCAGGAACCCCGCCAAAAATTCCCAGTG |
| | | GGATAACCGGGAGATCATTCTGTCTGACGAATTCATCAACCTGTTTAAACTCT |
| | | ACAACATCGACTACCAGAATTCCGACCTGAAGGTCCAGATCTGTAAGCAGAG |
| | | CGAAAAAGCCTTTTTTGAGAGGCTGCTGCACCTGCTGAAGCTGACCCTGCAG |
| | | ATGAGGAATAGTATGACTGGCACAGAGGTGGACTACCTTATCTCACCCGTGA |
| | | CCAATTCCAGGGGCGAGTTCTACGACAGTAGGACTGCAAGCGACATCCTGCC |
| | | CAAGAATGCCGATGCCAATGGCGCCTACAATATTGCCCGCAAGGGGATGTGG |
| | | GTCATCGAACAGATCAGGAAGGCCACAGACTTCCGGAAGCTGAAGCTGGCT |
| | | ATCAGCAACAAAGAGTGGCTGAGTTTTGTGCAGCACTGA |
| 201 | 161 | ATGAAGAGGTTTACCAATTTGTATCAGCTGTCAAAGACCCTCAGATTCGAGC |
| | | TCAAGCCAATAGGCAAGACTCTGGAGAATATCGAAAAGCACGGACTCCTCG |
| | | AGCAGGATACACATAGGGCCGAGTCCTACGTGAAGGTAAAAGACATTATTG |
| | | ACGAGTATCACAAGGCCTTTATCGAAGAGTATCTCAACACTTTCGCGGATTC |
| | | CTCAGAGACTTACGCAGAGCAAAACAAGAACTTCGTCAAACTGCTCCAAGA |
| | | ACTGTACACCAATTACATGTGTAAGACGAAGGATGAAACTCAGCAGAAGCT |
| | | ACTGACTGAGAGTCAGGCAAAGCTACGTAAGATCATAGCCAAAAGTTTTAAC |
| | | AACGACAAATACAAACGGCTGTTCGGTAAGGAATTAATCAAGGAAGAGTTG |
| | | ATCGACTTTCTCAAGGATGACGTCGAGGACATTACACTGGTGCAGGAGTTCA |
| | | AGGATTTTACTACATATTTCACCGGCTTTCACGAAAATCGCAAGAACATGTA |
| | | TTCTGATGAAGACAAATCTACCGCCATAGCCTACCGACTGATACACGAGAAT |
| | | CTGCCTAGGTTTATAGATAACATCCTGGTGTTCGAAAAGATTGCCCAAAGCG |
| | | ATGTGGCCCAGAAATTTACAGAGCTGTATAAGAACTTCCAGTCATACCTCAA |
| | | TGTTAAAGAGATCTCCGAGATGTTCAAATTAGGATACTATAACATGGTGCTG |
| | | ACACAGACACAGATCGACGTGTACAATGCTATAATTGGAGGCAAGACCATC |
| | | GAGGATAATGACATTAAAATCAAAGGGCTCAATGAATACATCAACCTGTACA |
| | | ACCAGCAACAGGAGGATAAGCATAACAGGTTACCCAAGCTCAAACCGCTCT |
| | | ATAAACAGATTTTATCTGACCGCAACGCCATTAGCTGGCTTCCTGAGCAGTTC |
| | | GATGCTAATGAGAAAGGCGGCAAAGTTCTGGAGGCTATTCAGAAGGCTTAC |
| | | AATGAGCTGGAGCAACAGATTCTGAACAATTCAAATGAGGCGGAGCATTCA |
| | | CTGCCTGAACTGCTGAAACTTCTGAGTAACTACGACCTAAACAAGATCTACA |
| | | TACCCAACGACGCCCAATTGACCGATATTAGCCAAAAGGTGTACGGACACTG |
| | | GAACATAATTTCGAAGGCACTGATCGAAGATCTGAAGCTGACCACACCACGG |
| | | AAATCTCGCAAGGAGACAGATGAAAAGTACGAAGAGAGACTCAACAAAATC |
| | | CTGAAGAGTCAATCATCTTTCAGCATCCGCAAGATAACTGACTCCGTGCACA |
| | | ACACATACCCCGAGATCAAATCTAGCATTATAACGTACTTCGAGAATATCGG |
| | | CAATATCGACAACGAAGAGGAAAACATTATTAGCAAGATCACTAACAGCTA |
| | | TAACATCGCCAAAGACTTACTGAACACCCCCTACCTCGGGAATAACCTCAGT |
| | | CAAGACACGGTAAATGTCGAGAAGATTAAAAACCTCCTGGACGCGATTAAG |
| | | GACTTGCAGCATTTTATTAAGCCCCTGCTAGGAAAAGGCGATGAGTCTGAGA |
| | | AAGATGAAAAGTTTTATGGGGAGTTCACTTTATTGTGGGACGAACTGAACAA |
| | | TATTACCCCTCTGTATAACATGGTGAGGAATTATATGACTAGAAAGCCATAC |
| | | TCCACTGAAAAGATCAAACTGAACTTCGAAAACAGCACACTTCTGGACGGAT |
| | | GGGATTTGAATAAAGAGACAGACAATACGTCCGTCATTCTGCGGAAAGATG |
| | | GAATGTACTATCTGGCTATAATGAACAAGAAGCACAATAGGGTGTTTAATAT |
| | | CGATTCGATACCCACCGAAGGGGACTGCTTTGAAAAGATGGAATATAAGTTG |
| | | TTGCCTGGCGCTAATAAGATGTTGCCAAAGGTATTTTTCTCTAAGTCACGCAT |
| | | CGACGAGTTTGCGCCATCTAAGCAGTTGATAGAAAAATACCAGTCTGGTACT |
| | | CATAAGAAGGGTGATAACTTTTCTCTGATCGACTGCCATAATCTCATCAACTT |
| | | CTTCAAAGACTCCATCAATAAACATGAGGACTGGAAAAAGTTCAACTTCAAT |
| | | TTCAGTGACACGAACACTTATGAGGACCTGTCTAATTTCTATAGGGAAGTGG |
| | | AAAAACAGGGCTATAAAATCAGCTTCCGGAATGTATCTTCAGAGTACATAAA |
| | | CTCACTGGTTGAAGACGGGAAAATCTACCTTTTCCAGATCTACAACAAGGAT |
| | | TTTTCCAGCTATAGCAAGGGAACACCTAATATGCACACACTGTACTGGAAGA |
| | | TGCTGTTTGACGAAACTAATATGAGTGACGTCTGCTATAAACTGAACGGGCA |
| | | GGCAGAAATCTTTTTCCGGAAATCCTCGATTAAGGCAGAACATCCGACCCAC |
| | | CCCGCTAATCAGCCGATCGAGAACAAAAATACCCTCAGCAATAAGAAACAA |
| | | TCAGTGTTCACCTATGACCTGATTAAGGACAAACGGTATACTATCGACAAAT |
| | | TCCATTTTCACGTCCCCATCACAATGAACTTTAAAGGCATCGGCATTAACAAC |
| | | ATTAACAACATCGTGAATCAGTTTATCCAGGAACAAGAAGATCTTCACATAA |
| | | TTGGAATTGACAGAGGAGAAAGGCACTTGCTATATCTAACCGTCATCGACTT |
| | | ACAGGGGAATATCAAGGAGCAGTACAGTCTTAATGAGATCATCAACAACTAT |
| | | AACGGCAATACCTATAAGACCAACTACCACGATCTTCTCGAAAAAAGAGAA |
| | | AAAGAACGAATGGATGCTCGTCAGAGTTGGAAGAGTATTGAGAGCATCAAG |
| | | GAGCTGAAGGAAGGTTACCTCAGCCAGGTTATTCATAAGATCACTAAGCTCA |
| | | TGATCAAATACAACGCTATCGTGGTGCTTGAGGACTTAAATATTGGCTTCAT |
| | | GCGGGGGCGACAAAAAGTTGAGGCTTCCGTTTATCAGAAGTTCGAGAAAAT |
| | | GCTCATTGATAAGCTGAACTATCTGGTGGATAAAAAAAAGCAGCCTGAGGA |
| | | ACTTGGGGGCACATTGAATGCTTTACAGCTTACCAACAAATTCGAATCCTTTC |
| | | AAAAGCTGGGCAAGCAGTCTGGATTTCTATTTTATACCCAGGCCTGGAATAC |
| | | CTCTAAAATAGATCCTGTCACGGGGTTTGTTAACCTGTTCGACACACGCTACG |
| | | AAACACGCGAAAAAGCAAAGGAGTTCTTTAAGAAGTTTGATTCCATCTGTTA |
| | | CAACAGCGAGAAAGATTGGTTTGAGTTCTCCTTTGACTATAACAATTTCACG |
| | | ACTAAGGCTGAGGGTACTAGAACCAACTGGACATTATGTACGTACGGTAAAC |
| | | GAATTGAGACATTTAGAGACGAGAAACAGAATAGTCAGTGGGCCTCAAATG |
| | | AGATTAACCTTACCGATAAGTTCAAGGAGTTTTTCGCGAAGTACAACATTGA |
| | | TATCAACGCAAACCTCAAGGAAAGCATTACAGCCCAAGAATCCGCAGATTTT |
| | | TTCAAAGGGATTCTCGCACTCTTGAAACTAACCCTGCAAATGCGTAATTCAA |
| | | TGACCGGTACCGATGTAGATTATCTTCAGTCGCCAGTGGCCGACAACAATGG |
| | | CGTGTTCTTCAATTCCCAGGAGTGCGACAATAGCCTGCCACAGAATGCCGAC |
| | | GCAAATGGGGCCTACAATATTGCCAGAAAAGGACTTTGGATTGTCAACAAAA |
| | | TCAAGATCAGCAATGATCTGTCCAACTTGAATTTCGCCATATCCAATAAAGA |
| | | GTGGCTTCAGTTTGCACAGGAGAAGCCCTACCTTTTGAATGATTGA |
| 202 | 162 | ATGGCAAGTCTGAAAAAATTCACAAGATTGTACCCCCTGTCCAAGACCCTGA |
| | | GATTCGAGCTGATTCCACTGGGCCTGACCGCCGACCATATCGGCAAGAGTGG |
| | | CATCCTGAGCCAGGACGAACACAGGGCCGAATCTTATAAGAAGGTGAAGAA |
| | | AATTATCGATGAGTACCACAAGGCCTTCATCGAGAAGGTGCTGAACAACATC |
| | | CACCTGCAGTATGACAACATCGAACAGAACAATAGCCTGGAGGAGTATTTCC |
| | | TGTACTACATGATCAAAAACAAAGACGAGAAGAAGGAGAAGATCTTTGAGG |
| | | AGATCCAGAAGAAGCTGCGGAAGCAGATCGCCGATAGATTTATCGACGATC |
| | | CATCTTTCAAGAATATTGATAAGAAAGAACTGATTCGCTCCGACCTGAAGGA |
| | | TTTCGTGTGTAGCCAGGAGGATCTGCAGCTGGTGGACGAGTTCAAGGATTTC |
| | | ACCACCTATTTCACAGGCTTCCATGAAAATAGAAAGAACATGTACTCCTCTG |
| | | AGGCCCAGAGCACCGCCATCGCCTTCAGACTGATCCATGAGAACCTGCCTAA |
| | | GTTTATCGATAACATCCAGGTGTTCAACAAGGTGGCCGCCTCATCCGTGTCA |
| | | GAGTTTTTCACTGAGCTGTACGCCAACTTCGAAGAGTGCCTCACAGTGACCG |
| | | AGATCGCCGAGATGTTCAAGCTGGAGTACTTTAACAGCGTGCTGACACAGAA |
| | | GCAGATCGACGTGTACAATTTCATTCTGGGTGGAAAGTCCATCGAGGGGGGC |
| | | TCTAAGATTAAGGGGCTGAACGAGTACATCAACCTGTACAACCAGCAGCAG |
| | | AAGGACAAGTCCAAGCGGCTGCCAAAGTTCAAGCCTCTGTTTAAAGAGATTC |
| | | TGAGCGACCGAAATAGCATTTCTTGGCTGCCAGAAAAGTTTAAAAGCGACGA |
| | | GGAAGTGCTGGAGACAATCGAGAAGGCTTATCAGGAACTCAATGAGCACGT |
| | | GTTGAACAGAAACGTGGGGGGGGAGCACTCTCTGAAGGAGCTGCTGGTGCG |
| | | GCTGGAGGACTTCAACCTCGACAAGATCTACGTGAGAAACGACCAACAGCT |
| | | GACCGACATCAGTCAGAAAATCTTCGGCCACTGGGGGACTATATCCAAAGCC |
| | | CTGCTGGAAGAGCTGAAGAACGAGGTGCCCAAGAAAAGCAACAAGGAGACA |
| | | GACGAGGCCTACGAGGAACGGCTGAACAAGATCCTCAAATCCCAGGGAAGT |
| | | GTGTCTATCGCCCTGATTAACAACTCCATCCAGAAGCTGAATATCGAAGAGA |
| | | AAAAGACCGTGAACAGTTACTTCAGCCTGAACAGCAATATTTGCCCCAAGGA |
| | | CAATCTGTATACAAGGATTGAGAACGCCTACCTGGAGGTGAAAGACCTGCTG |
| | | AATACCCCTTATACTGGCAAAAATCTGGCCCAGGACAAACTGAACGTCGAAA |
| | | AAATCAAGAATCTGCTGGACGCCATCAAGTCACTGCAGCATTTCGTGAAGCC |
| | | CCTGCTCGGCGACGGAAAGGAACCCGAGAAAGACGAGAAATTCTATGGCGA |
| | | GTTCTTGTCTCTGTGGGAGGAACTGGACAAGATCACTCCACTGTACAATATG |
| | | GTGAGGAATTACATGACACAGAAGCCCTACTCTACCGAGAAGATCAAGATC |
| | | AACTTTGAAAACAGTACCCTGATGGATGGATGGGATGTGAACAAGGAGCGG |
| | | GACAACACCAGCGTGATTCTGCGAAAAGACGGCCTGTATTACCTGGCCATCA |
| | | TGAACAAGAAGAACAACCAGGTATTTGATGCCCACAATACTOCCAGTAATGG |
| | | CATCTGCTACGAAAAAATGGAGTACAAACTTCTGCCCGGAGCTAACAAGATG |
| | | CTGCCTAAAGTGTTCTTCTCCAAATCCCGGATCCATGAGTTTGCCCCCTCCAA |
| | | GAAGCTGATCGAGAATTACAAGAACGAGACCCACAAGAAAGGCACCACTTT |
| | | CAATCTGGACGACTGTCACAAGCTGATCGACTTTTTCAAGACCAGCATCAAG |
| | | AAGCATGAGGATTGGAACAGATTTGAGTTTAAGTTTTCTGATACTACCACCT |
| | | ACGAGGATCTGAGCGGGTTTTACAAAGAAGTGGAGCAGCAGGGCTACAAAA |
| | | TCTCTTTCCGCAATGTGAGCGCCGATTACATTGATAATCTCGTGAAGGAGGG |
| | | CAAGATCTACCTGTTCCAGATTTACAACAAGGACTTCTCCCCATATTCCAAGG |
| | | GCACCCCAAATCTGCACACCCTGTACTGGAAAATGATTTTCGACGAGCGGAA |
| | | TCTGGCCAATGTGGTGTACAAGCTGAACGGCCAGGCCGAGGTGTTTTTTCGG |
| | | AAGAGCTCCATCTCATACGACAAGCCTACCCACCCCGCCAACCAGGAGATTG |
| | | ATAACAAGAACATCCTGAATAAGAAAAAGCAGTCCATATTCTCCTACGATCT |
| | | GATTAAGGACAAGAGATATACTGTGGACAAGTTCCAGTTTCATGTGCCTATC |
| | | ACCATGAATTTCAAGTCCACCGGGCAGGATAATATCAATCTGAGCGTCAACG |
| | | AGTACATCCGGCAGAGCGATGACCTGCACATCATCGGCATTGACAGAGGCG |
| | | AGCGCCACCTGCTGTATCTGACCGTGATCGACCTGGAGGGCAGAATTAAGGA |
| | | GCAGTATTCCCTGAACGAGATTGTGAACATCTATAACGGCAATGAGTACCAT |
| | | ACCAATTACCATGACCTGCTGTCAAAACGCGAGGACGAGCGGGAGAAGGCC |
| | | CGCCAGTCATGGCAGACCATCGAGAATATTAAGGACCTGAAGGAGGGCTAC |
| | | CTGAGCCAGGTGATTCATAAAATTTCCGAGCTGATGATTAAATATAACGCCA |
| | | TCGTGGTGCTGGAGGACCTGAACATCGGGTTTATGAGGGGTCGCCAGAAGGT |
| | | GGAAGCCTCCGTGTACCAGAAGTTTGAGAAGATGCTGATCGACAAACTGAAC |
| | | TACCTGGCCAACAAGAAGATTGATCCTGAGGAGGAGGGCGGAATTCTGAAC |
| | | GCCTACCAGCTGACCAACAAGTTCACCAGCTTTCAGAAGATCGGCAAACAGT |
| | | CAGGCTTCCTTTTTTACACTCAGGCCTGGAACACCTCTAAGATCGACCCCAGC |
| | | ACAGGCTTCGTGAATCTGTTTGATACCAGATACGAGACCCGCGAGAAGAGCA |
| | | AGATGTTCTTCAGTAAGTTTGACTCAATCAAATATAACAAAGATAAGGATTG |
| | | GTTTGAATTTATCTTCGACTATACCAACTTTACCACCAAGGCCGAAGGCACA |
| | | CGCACCCAGTGGACAATCTGCTCCTACGGCAAGCGGATTGAGACACTGAGGG |
| | | ATGAGAACAAAAACTCTAACTGGGTGAGTACCGAGATCGACCTGACCCAATC |
| | | CTTTAAGAACTTCTTTACCAAGTACGGCATCGACATCAACGACAACCTGAAA |
| | | GAGTTCATTGTGCAGCAGGATACTTCCGAGTTCTTCAAGGGCATCCTGTACCT |
| | | GTTCAAGCTGACTCTGCAGATGAGAAACAGCGCCATCGGCAAGGACATCGAT |
| | | TATATTATCAGCCCCATCGCCGACGAGAAAGGCATCTTTTATAATTCCAATG |
| | | AGTGCGACTCCAGCCTGCCTAAGAACGCCGATGCCAATGGGGCCTATAACAT |
| | | TGCCCGGAAGGGCCTGTACATTGTGCGAAAGATAAAGCACTCTGATGAACTC |
| | | AAAAATCTGAATCTTGCCATAACTAACAAGGAGTGGCTTCAGTTCGCCCAGA |
| | | GCAAGCCTTACATCAATAAGTGA |
| 203 | 163 | ATGAAGAAACTGAATGCCTTCTCTCGGATCTATCCCCTGTCCAAAACCCTGC |
| | | GGTTTGAACTGCGCCCTATCGGCAAGACACTGGAGCACATCGAGAAATCAGG |
| | | AATCCTGAGCCAGGACCAACACCGCGCCGAGTCTTATGTGGAGGTGAAGAA |
| | | GATCATCGATGAATATCACAAAGCCTTCATTGAGAATGTGCTGAAGGACTTC |
| | | CGCTTTAGCGAAAACAGAGGCGAGAAGAACTCCCTGGAGGAGTTCCTGGTGT |
| | | ACTATATGTGTAAGTCCAAGGACGAAACCCAGAAGCGGCAGTTCGCCGATAT |
| | | CCAGGACAAACTTAGAAAACAGATTGCTAAGAGGTTCTCCGACGACGATAG |
| | | GTTTAAACGGATCGATAAGAAGGAGCTGATCAAGGAAGACCTGCTGAGCTTC |
| | | GTGGAGGACGTGGAAAAGCGGCAGCTGATTGAGGAGTTCAAGGACTTTACC |
| | | ACTTATTTTACCGGATTTCATGAAAATAGAAAGAACATGTACACTGATGAGG |
| | | CCCAGAGCACCGCCATCGCCTACAGGCTGATCCACGAGAATCTGCCAAAATT |
| | | CATCGACAATATCATGGTGTTTGATAAGGTGGCCGCCTCTCCCATCGCCAAG |
| | | TACTTCGCCGAGCTGTACTCCGATTTCGAGGAGTACCTGAACGTGTCCGAAC |
| | | TGGGAGAGATGTTCCGGCTGGATTACTACAACATTGTGCTGACACAGACTCA |
| | | GATCGACGTGTATAACGCTGTGGTGGGCGGCCGGACCCTCGATGACGGCACC |
| | | AAGATCCAGGGACTGAATGAATACATAAACCTGTATAATCAGCAGCAGAAA |
| | | GATAAGTCCGCCCGGCTGCCCAAGCTGAAGCCTCTGTACAAGCAGATCCTGT |
| | | CCGACAGAAACGCTATTAGTTGGCTGCCTGAGCAGTTCCAGAGCGATGAGAA |
| | | GGTGCTGGAAGCCATTCTGAAGGCTTATCAGGAGCTGGACGAGCAGGTGCTG |
| | | AATAGGAAGAAGGAGGGCGAGCACTCCCTGAAGGAGCTGCTCCTGAGCCTG |
| | | TCCAATTACGACCTGACCAAGATTTACATCAGAAATGACACACAGATGACAG |
| | | ATATTTCCCAGAAAGCCTTTGGCCATTGGGACGTGATCCCTAAAGCCCTGCT |
| | | GGAACAGCTTAAGAAGGAGGTGCAGAAGAAGTCTAAAGAGTCCGAAGAGGG |
| | | TTATGAGGAGCGCCTGAACAAAATTATCAAGTCCCAGGGCTCCATTCCCATA |
| | | GCCCTGATTAACCAGGGAGTGCAGAAGCAGAACTCCGAAGAACAGAACACC |
| | | CTGCAGACTTACTTCGCCAGTCTGGGAGCCGTGGAGACCGAGTCCGTGAAGA |
| | | AGGAGAATCTGTTTACCCAGATTGAAAATGCTTACGCCGAGGTGAAAGATCT |
| | | GTTGAATACCCCTTATAGTGGCAAGAATCTGGCACAAGATAACGTGGCCGTG |
| | | GAGAAAATCAAAACCCTGCTCGACGCCATCAAAGCCCTGCAGCACTTCGTGA |
| | | AGCCTCTGCTGGGCGACGGAACCGAGAGCGAGAAGGATGAGAAGTTTTACG |
| | | GCGAATTCTCCATGCTTTGGGAAGAGCTGGACAAGATCACCCCCCTGTATAA |
| | | TATGGTGAGAAACTACATGACCCGGAAGCCTTACAGCACAGAGAAAATCAA |
| | | GCTGAATTTTGAGAACTCCACTCTGATGAACGGGTGGGACCTGAACAAGGAG |
| | | CAGGATAACACCACCGTGATCCTGAGAAAAGACGGGATCTATTACCTGGCTA |
| | | TCATGGATAAGAAGCACAAGAAAGTGTTCGACGAGAAAAACATCCTGGGAT |
| | | CCGGGGAATGTTTCGAAAAAATGGAGTACAAGTTTTTCAAAGATCTCACCAC |
| | | CATGGTGCCCAAGTGCACAACCCAGCTGAAGGTGGTGAAAGAACACTTCCTG |
| | | ACCCACAGCGAGCCCTACACCATCTCCAAGGACGTGTTTTACAGCAAATTCG |
| | | AGATCACTAAAGAGGAGTACGAGCTGAACAATGTGCTGTATAATGGCAAAA |
| | | AGAAATTCCAGAAAGATTACCTGAGACAGACCGGCGATGAGAAGGGTTATA |
| | | AGGATGCCCTGACCAAGTGGATCCGGTTCTGCCTGAGATTTCTGGCTCAGTA |
| | | CAAGAGCACCATGATTTATGACATTTCCTCTTTTCAGGTGGACTGCAAAATTA |
| | | ACTCATATACATCCATCGATGAATTTTACAGCGAGATCAACCTGTATCTGTAC |
| | | AACATCACATTCCGGAACGTGTCGGTGGATTATATTAACTCTCTGGTGGAGG |
| | | AGGGCAAGATCTACCTGTTCCAGATTTACAACAAGGACTTCAGCCCCTACAG |
| | | CAAGGGCACTCCCAACCTGCACACCCTGTATTGGAAGATGCTGTTCGATGAA |
| | | AAGAATCTGGCTGATGTGGTGTACAAACTGAATGGCCAGGCTGAAGTGTTCT |
| | | ATAGAAAATCATCAATCATCTGTGAGAGGCCAACCCACCCTGCCAACCAGGC |
| | | CATCAATAATAAAAACGTCCTGAACAAGAAAAAGCACTCCACATTCGTGTAC |
| | | GATCTCGTCAAAGATAAGCGGTACACTGTGGACAAGTTCCAGTTCCACGTGC |
| | | CCATCACAATGAACTTTAAGTCCACTGGCGGCGATAACATCAATCTCCTGGT |
| | | GAACGAGTATATCCAGCAGAGCGACGATCTGCACATCATCGGCATCGATAGA |
| | | GGCGAGCGCCACCTGCTGTACCTGACCGTGATTGACCTGCAGGGGCGGATTA |
| | | AAGAGCAGTATTCCCTGAACGAGATCGTGAACACTTACAATGGCAATGAGTA |
| | | CCGCACTAACTATCACGACCTGCTGAGCAAGCGCGAAGACGAGCGCATGAA |
| | | AGCCCGGCAGTCATGGCAGACTATTGAGAACATCAAGGAGCTGAAAGAAGG |
| | | CTATCTCAGCCAGGTGATCCACAAGATCTCTGAGCTGATTGTGAAGTACAAT |
| | | GCCATCGTGGTGCTGGAGGACCTGAACATGGGCTTCATGAGAGGCAGGCAG |
| | | AAGGTGGAAAGCTCTGTGTACCAGAAGTTCGAAAAGATGCTGATCGACAAG |
| | | CTGAACTACCTGGTGGATAAGAAGAAAAACCCTGAAGAGGATGGCGGAGTG |
| | | CTCAACGCCTATCAGCTGACTAACAAGTTTGAGTCATTCCAGAAAGTGGGGA |
| | | AACAGAGCGGGTTTCTGTTCTACACTCAGGCTTGGAATACATCTAAGATCGA |
| | | CCCCGTGACCGGCTTCGTGAACCTGTTCGACACTAGATACGAGACCAGAGAG |
| | | AAAGCGAAGGACTTCTTTGGCAAGTTCGACGCCATCCGCTACAACACCGCCA |
| | | AAGATTGGTTCGAGTTCGCCTTCGACTACAGCAATTTCACTAGTAAGGCCGA |
| | | GGGGTCTCGGACTAACTGGACCCTGTGTACCTACGGCGAAAGGATCGAGAA |
| | | GTTTAGAGATGAGAAACAGAACTCCAACTGGGCCTCCAGGGGCATCAATCTG |
| | | ACCGACAAGTTCAAAGAGCTGTTTGCCGAGTATAAGATCGACATTCAAACCG |
| | | ACCTGAAGGAGGTGATCAGCCGCCAGGATAGCGCCGATTTCTTCAAGCGCCT |
| | | CCTGTATCTGCTCAAGCTGACCCTGCAGATGAGAAACTCCGAGACCGGCACC |
| | | GAGGTCGACTACATGCAGAGCCCTGTGGCCGACGCAAATGGCAATTTTTATA |
| | | ACAGCGAGACCTGCGACGACTCCCTGCCTAAGAACGCCGATGCCAACGGCG |
| | | CCTATAACATCGCCCGGAAGGGCCTGTGGATTGTGCAGCAGATTAAGGCCAC |
| | | CGACGACCTGAAGAACGTGAAGCTGAGCATCTCCAATAAGGAATGGCTGAA |
| | | GTTCGCCCAGGAGAAACCCTACCTGAACGAGTAA |
| 204 | 164 | ATGAAGAAGCTGAACGCCTTCTCGAGAATCTACCCCCTGAGCAAGACCCTGC |
| | | GCTTTGAGCTGAGACCCATTGGCAAGACACTGGAGCATATCGAGAAGTCCGG |
| | | TATCTTGTCACAGGATCAGCACCGGGCCGAGTCCTATGTGGAGGTGAAGAAG |
| | | ATTATCGACGAGTACCACAAGGCCTTCATCGAAAACGTGCTGAAGGACTTCA |
| | | GATTTAGCGAGAATCGGGGCGAGAAGAATTCCCTGGAAGAATTCCTGGTGTA |
| | | CTACATGTGCAAGTCTAAAGATGAGATGCAGAAGAGGCAGTTCGCCGACATT |
| | | CAGGATAAATTGCGCAAGCAGATCACCCAGCGATTCAGCGACGACGACCGG |
| | | TTTAAGAGAATCGACAAGAAGGAGCTGATCAAGGAAGACCTGCTGTCCTTTG |
| | | TGGAGGATGTGGAGAAGAGACAGCTGATTGAGGAGTTTAAGGACTTCACCA |
| | | CCTACTTTACCGGCTTCCACGAGAACAGAAAGAACATGTATACCGACGAGGC |
| | | CCAGAGCACTGCAATCGCCTATCGGCTGATCCACGAGAACCTGCCCAAGTTC |
| | | ATTGACAACATCATGGTGTTCGACAAGGTGGCCGCCAGCCCCATTGCCGAGC |
| | | ATTTTGCCAAGCTGTATTCCGACTTCGAGGAGTATCTGAACGTGAGCGAGCT |
| | | GGGGGAGATGTTCAGGCTGGATTATTATAATATCGTTCTGACACAGACCCAG |
| | | ATCGACGTGTACAATGCCATTGTGGGGGGGAAGACCCTGGAGGACGGGAAG |
| | | AAAATTCAGGGACTGAATGAGTACATCAACCTGTACAACCAGCAGCAGAAG |
| | | GACAAATCCGCCAGACTGCCTAAGCTCAAGCCTCTGTATAAGCAGATCCTGT |
| | | CTGATAGGAATGCTATCTCCTGGCTGCCCGAGCAGTTTCAGTCTGACGAGAA |
| | | GGTGCTGGAGGCCATCCAGAAGGCCTACCAAGATCTGGAGGAGCAGGTCTTT |
| | | AACCGCAAAAAGGAGGGAGAGCACTCACTGAAAGACCTCCTGCTGAGCTTG |
| | | TCCGACTATGATCTGTCTAAAATTTACATCAGGAATGACACTCAGATGACCG |
| | | ACATCTCCCAGAAGGCCTTCGGACACTGGGACGTGATCCACAAGGCCCTGCT |
| | | GGAGCAGCTCAAGGAAGACGTGCAGAAGAAGCCCAAGAAAGAGAGCGATG |
| | | AGGCCTACGAGGAGAGGCTGAACAAGATTATAAAGAGTCAGGGCAGCATCC |
| | | CCATTGCCCTGATCAATCAGGGGGTGCAGAAGCAGAACAGCGAGGAGCAGA |
| | | ACACCCTGCAGACCTACTTCGCCAGTCTGGGCGCCGTGGAGACTGAATCCGT |
| | | GAAAAAAGAGAATCTGTTTACACAGATCGAGAACGCCTACGCCGAGGTGAA |
| | | GGACCTGCTGAATACTCCCTACTCCGGCAAGAATCTGGCCCAGGACAACGTG |
| | | GCCATCGAGAAGATTAAAACACTGCTGGACACAATCAAGGCCCTGCAGCACT |
| | | TCGTGAAACCCCTGCTGGGGGACGGCACAGAGTCTGAAAAGGATGAGAAAT |
| | | TTTATGGCGAATTTAGTATGCTGTGGGAGGAGCTGGACAAGATTACCCCTCT |
| | | GTATAACATGGTGCGGAACTATATGACCAGAAAGCCCTACTCCACCGAGAAA |
| | | ATCAAGCTGAACTTCGAAAACAGCACTCTGATGAACGGGTGGGACCTGAAC |
| | | AAGGAGCAGGATAACACCACCGTGATCCTGAGGAAAGATGGGATGTATTAC |
| | | CTTGCTATCATGAACAAGAAGCACAACAGAGTGTTTGACGTGAAGAACATCA |
| | | GCAAAAACGGCGAGTGTTTTGAAAAAATGGAGTACAAGCTGCTGCCCGGAG |
| | | CCAACAAGATGCTGCCCAAGGTGTTCTTTTCAAAGAGCAGGATCGACGAGTT |
| | | CGCCCCCTCCGAACAGCTGCTGGAAAATTACAACAAGGGAACCCACAAAAA |
| | | GGGCAATCTGTTTAACCTGTCTGATTGCCATGCCCTGATCGATTTTTTTAAGG |
| | | CCTCTATCAATAAGCACAAAGACTGGAGCAAGTTCGGCTTCAAATTCTCTGA |
| | | CACTAACACATACGAGGACCTGTCTGGATTCTACCGAGAGGTGGAGCAGCAG |
| | | GGATATAATATCTCCTTTCGGAATGTCAGCGTGGACTATATTAATAGCCTGGT |
| | | GGAAGAGGGAAAGATCTATCTGTTTCAGATTTATAACAAGGACTTCTCACCA |
| | | TACAGCAAGGGCACCCCAAACCTGCACACACTTTACTGGAAGATGCTGTTTG |
| | | ACGAAAAAAATCTGGCCGATGTTGTGTACAAGCTGAATGGCCAGGCCGAAG |
| | | TTTTCTTTAGAAAATCCTCTATCATTTGCGACAAGCCTACACACCCAGCAAAC |
| | | CAGCCCATCGACAACAAGAACGCTCTGAATAACAAGCAGCAGTCTGTGTTCG |
| | | AGTACGATCTGGTCAAAGACAAGAGGTATACCGTGGACAAGTTTCAGTTCCA |
| | | TGTGCCCATCACCATGAATTTTAAGAGCACCGGCGGGGATAACATCAATCTG |
| | | CTGGTGAACGAGTATATCAGACAGAGCGACGATCTGCACATCATCGGAATCG |
| | | ACAGAGGTGAGAGACACCTGCTGTACCTGACGGTGATTGATCTGCAGGGCCG |
| | | GATTAAGGACAAGGAGCAGTACAGCCTGAATAAGATCGTGAACACCTACAA |
| | | CGGCGACGAGTACCCAACAAATTATCACGATCTGCTGAGCAAGCGCGAGGA |
| | | TGAGAGAATGAAGGCCAGGCAGAGCTGGCAGACAATCGAGAATATCAAGGA |
| | | ACTGAAGGAGGGGTATCTGAGCCAGGTGATTCACAAAATCAGTGAACTGATT |
| | | GTGAAATATAATGCCATCGTTGTGCTGGAAGATCTGAACATGGGATTCATGA |
| | | GGGGTCGGCAGAAGGTGGAGAGCTCCGTGTACCAGAAGTTTGAGAAGATGC |
| | | TGATCGACAAGCTGAACTATCTGGTCGATAAGAAAAAGAACCCTGAGGAGG |
| | | ATGGGGGAGTGCTGAACGCTTACCAGCTGACAAACAAGTTCGATAGCTTTCA |
| | | GAAACTGGGCAAGCAGTCTGGCTTCCTGTTTTACACTCAGGCCTGGAACACC |
| | | AGCAAGATTGACCCTGTGACAGGGTTTGTGAACCTGTTCGATACAAGATATG |
| | | AAACAAGAGAAAAAGCCAAGGACTTCTTTGGCAAGTTTGACGCCATTCGGTA |
| | | CAACACCGCTAAGGACTGGTTCGAGTTCGCGTTCGACTACAGCAACTTTACT |
| | | AGCAAAGCAGAAGGCTCTAGAACAAACTGGACACTGTGCACCTATGGAGAA |
| | | CGGATCGAGAAGTTCCGGGACGAGAAGCAGAACAGCAATTGGGCCAGCCAG |
| | | GGCATTAACCTGACCGATAAATTCAAGGAGCTGTTTGCCAAGTACAAAATTG |
| | | ATATTCAGGCCGATCTGAAAGAAGCTATCAGTCAGCAGGACTCCGCCGACTT |
| | | CTTCAAAGGCCTGCTGTACCTGCTGAAGCTGACACTGCAGATGAGAAATTCT |
| | | GAGATCGGCACAGAGATTGACTACATGCAGTCACCCGTGGCAGATGCAAAT |
| | | GGCAACTTCTATAACTCTGATACATGCGATGACAGCCTGCCTAAAAACGCTG |
| | | ACGCAAATGGCGCCTACAACATCGCCCGGAAGGGCCTGTGGATCGTTCAGCA |
| | | GATTAAGGCCGCCGATGATCTGAAAAATGTGAAACTGAGCATCTCCAATAAA |
| | | GAATGGCTGAAGTTCGCCCAGGAAAAGCCTTATCTGAATGAGTGA |
| 205 | 165 | ATGTTTATCATGACTTCACTTAAACGGTTCACAAGAGTCTACCCCCTGAGTAA |
| | | GACCCTGAGATTTGAACTGAAGCCTGTGGGGAAGACCCTGGACCACATCGTG |
| | | TCTTCTGGACTGCTGGAGCAGGACCAGCACCGCGCAGGCAGCTATGTGGAGG |
| | | TGAAAAAGATTATCGATGAGTACCACAAAGCCTTCATTGAGTCCAGCCTGGA |
| | | CGATTTTGAGCTGCAGTATTACAATGAGGGGAAGAATAACAGTCTGGAAGA |
| | | GTTCTACAGCTATTACATGTGTCGGTCTAAGGATGAAACACAGAAAAAGTTG |
| | | TTCGAGGAGAATCAGGACAAGCTCAGAAAGCAGATCGCCGATAGACTGAGC |
| | | AAGGACGAGAGATTCAAGCGCATCGACAAAAAGGAGCTGATCGAAAAGGAT |
| | | CTCATCGACTTCGTCAAGAAACCAGAAGAGAGACAGCTGCTGGAAGAGTTC |
| | | AAGGGATTTACCACCTATTTTACCGGCTTTCACGAGAATCGCAAGAATATGT |
| | | ACAGTGCCGAGGCCCAGTCCACTGCCATCGCCTATAGACTGATTCACGAGAA |
| | | CCTGCCCAAGTTCATCGACAATATCATGGTGTTTGACAAGGTGGCCGCCTCC |
| | | CCTGTGGCCGACTCCTTCGCCGAGCTGTATGCCAATTTCGAAGAGTACCTGA |
| | | ATGTGACAGAAATCGCCGAAATGTTTAACCTCGCCTATTATAACGTGGTGCT |
| | | GACCCAGTCCCAGATCGACGTGTACAACGCCATCATCGGCGGCAAGACCTTC |
| | | GAGAACGGCGTGAAAATTAAGGGCCTGAATGAATACATCAATCTGTACTCCC |
| | | AGCAGCAGAAGGACAAAAGCGCCCGCCTGCCTAAACTGAAGCCCCTGTACA |
| | | AACAGATTCTTAGCGACAGAAACGCCATCAGCTGGCTGCCAGAATACTTTTC |
| | | AGAGGACGAAAAGCTGCTGGAGGCTATCCAGAAGTCTTACCAGGAGCTGGA |
| | | TGAGCAGGTGTTCAACCGGAAGAGGGAGGGCGAGCACAGCCTGAAGGAGCT |
| | | GCTGCTGGGCCTTGAGGGGTTCGACCTGTCCAAGATTTATATCCGGAACGAT |
| | | TTGCAGCTGACAGACATTTCTCAGAAAGTGTACGGTAGCTGGTCAGTGATCC |
| | | AGAAAGCACTGCTGGAAGAACTGAAGGGCGAGGTGCAGAAGAAGAGCAAA |
| | | AAGGAGACCGACGAAGCCTACGAAGATAGACTGAATAAGATCCTGAAGTCT |
| | | CAGGGATCAATCTCCATCGCCCTGATTAACGATTGTGTGCACAAGCTGAATT |
| | | CCGAGGAGCAGAACACAATCCAGGGGTACTTCGCCACCCTGGGCGCCGTGG |
| | | ACAACCAGATCCTGCAGAAAGAGAACCTGTTTGTGCAGATCGAGAACGCCTA |
| | | CACTGAGATTAAGGACCTGCTGAACACCCCATACCAGGGCAGAAACCTGGCC |
| | | CAGGACAAGGTGAATGTGGAGAAGATCAAGAACCTGCTCGATTCCATCAAG |
| | | AGCCTGCAGCACTTTGTGAAACCACTGCTGGGCGACGGGAGCGAAGCCGAG |
| | | AAGGACGAGAAGTTCTATGGGGAGTTTGTCGCCCTGTGGGACGAGCTGGACA |
| | | AAATCACCCCTCTGTACAACATGGTGAGAAATTACATGACCAGGAAGCCCTA |
| | | CTCCACAGAGAAGATCAAGCTGAATTTCGAAAATTCTACCCTGATGGATGGG |
| | | TGGGACCTGAATAAGGAGCAGGCCAACACCACCGTGATCCTGAGAAAGGAT |
| | | GGGCTCTATTACCTGGCCATCATGAACAAGAAGAACAACAAAGTGTTCGACG |
| | | TGAAGAACATTAGCTCTAAGGGCGAGTGCTATGAGAAGATGGAGTATAAAC |
| | | TGCTGCCCGGCGCTAACAAGATGCTGCCCAAAGTGTTCTTCTCCAAGAGCAG |
| | | GATCCACGAATTCGCCCCCTCTGAGCAGCTGCTGGAAAACTATAACAACGAG |
| | | ACCCACAAGAAGGGCGCTACCTTCAACCTGTCCGACTGCCACGCCCTGATCG |
| | | ATTTCTTTAAAGCCTCCATCAATAAGCACGAGGATTGGTCCAAATTCGGATTC |
| | | AATTTTTCCGACACCTCCTCCTACGAAGATCTGAGCGGATTTTATCGGGAGGT |
| | | GGAGCAGCAGGGGTACAAGATCTCCTTTAGGAATGTGAGCGTGGACTATGTG |
| | | GATTCACTCGTGGAAGAGGGCAAGATTTATCTGTTCCAGATCTACAACAAGG |
| | | ATTTCAGTCTGTATAGTAAGGGCACACCCAACCTGCATACCCTGTACTGGAA |
| | | AATGCTGTTCGATGAGAAGAACCTGGCCGACGTGGTGTACAAGCTCAACGGA |
| | | CAGGCTGAAGTGTTTTTTAGGAAATCCAGTATTAACTACGAGAGACCCACCC |
| | | ACCCCGCCAACCAGCCAATTGACAACAAGAATCCCCAGAATGAGAAAAAAC |
| | | AGAGCGTGTTTAACTACGATCTGATCAAGGACAAGAGATACACAGTCGACA |
| | | AGTTTCAGTTCCACGTGCCCATCACAATGAATTTTAAGTCCACCGGCTCCGAG |
| | | AACATTAATCAGAGCGTGAATGAGCACATCCAGAAGAGCGATGACCTGCAC |
| | | ATCATCGGCATAGACCGCGGTGAACGCCACCTGCTGTACATCACCGTGATCG |
| | | ACCTCAAGGGAAGGATAAAGGAGCAGTTTAGCCTGAACGAGATTGTGAACC |
| | | ACTACAACGGCAAGAACCACTGCACCGACTACCACGCCCTGCTGTCCAAAAG |
| | | GGAGGAGGAGAGAATGAAGGCTCGGCAGTCCTGGCAGACCATCGAGTCTAT |
| | | CAAGGAGCTGAAAGAAGGCTATCTGAGCCAGGTGGTGCACAAGATTAGCGA |
| | | GCTGATGGTGAAGTATAACGCCATCGTGGTTCTGGAGGATCTGAACATGGGG |
| | | TTCATGCGGGGCAGGCAGAAAGTGGAAGCTAGCGTGTACCAGAAATTCGAA |
| | | AAAATGCTGATCGATAAGCTGAACTACCTGGCCGACAAAAAGAAAGGGCCA |
| | | GAGGAGGAGGGCGGCATTCTGAACGCCTACCAGCTCACCAATAAGTTCGTGT |
| | | CCTTCCAGAAGATGGGAAAACAGTCCGGCTTCCTCTTTTACGTTCCAGCTTGG |
| | | AACACCAGCAAGATTGACCCCGTGACTGGATTCGTCAACCTGTTTGATACTC |
| | | GCTACGAGACCCGCGAGAAGGCTAAGGCTTTCTTCGCCAAGTTCGAGTCCAT |
| | | CAGGTACAACGAGGATAAGGATTGGTTTGAATTTGCATTCGACTACTCTAAG |
| | | TTTACATCCAAGGCCGATGGCAGCTGCACAAAATGGACCGTGTGTACCTATG |
| | | GCAAGCGAATTGAGACATTCAGAGACGAGAAGCAGAACTCTAACTGGGTGA |
| | | GTAAGGAGGTGTGTCTGACTGAGAAATTCAAGGATTTTTTCGCCAAGTACGG |
| | | CATCGAGCTGAGATCTAATCTGAAGGAGTACATTATCTCCCAGGATAGCGCT |
| | | GATTTTTTCAAAGGACTGCTGTCCCTGCTGAAGCTGACCCTGCAGATGAGAA |
| | | ACTCCGAAACCGGGACAGATGTGGATTATCTGCAGAGCCCCGTCGCCGACGC |
| | | CAACGGGGAGTTCTACAACAGCGAGAACTGCGACGAATCTCTGCCCGAGAA |
| | | CGCCGACGCAAACGGAGCCTATAATATCGCTCGAAAGGGGCTGTGGGTTGTG |
| | | AAACAGATAAAAGGGGCCGACGACCTGAAGAATCTGAAGCTCGCCATTTCC |
| | | AACAAGGAGTGGCTGCAGTTTGTGCAGGCCAAACCCTATCTTAACGACTGA |
| 206 | 166 | ATGAAGACTTTCCAGCAGTTTTCACGCGTGTACCCACTGTCAAAGACCCTGA |
| | | GATTCGAACTGAAGCCAATCGGCAGTACACTGGAACACATTAACAAGAACG |
| | | GCCTGCTCGACCAGGACCAGCACCGCGCCAAGAGCTACATTCAGATGAAGA |
| | | ACATTATCGACGAGTACCACAAGGAGTTCATCGAGGACGTGCTGGACGACCT |
| | | GGAACTGCAGTACGACAACGAGGGAAGGAATAATAGCATCTCCGAATTCTA |
| | | CACCTGCTACATGATCAAGTCTAAGGACGACAACCAGAGGAAGTTATACGA |
| | | GAAGATCCAGGAGGAGCTTCGGAAGCAGATTGCCAACGCCTTTAACAAGTCC |
| | | GACATTTATAAGAGGATCTTCTCAGAGAAGCTGATTAAGGAGGATCTGAAGA |
| | | ACTTTATCACAAATCAGAAAGATAACGATAAGAGAGAGCAGGATATCCAGA |
| | | TCATCGAGGAGTTTAAGAATTTCACCACCTATTTCACCGGATTCCATGAAAAT |
| | | AGGAAAAACATGTACACCAGCGAGGCTCAGAGCACGGCCATCGCCTATAGG |
| | | CTGATCCACGAGAACCTGCCCAAATTCATCGATAATATTATGGTGTTCGATA |
| | | AGGTGGCCGCCTCTCCTATCGCTGACAGCTTCAGCGAGCTGTACACCAATTTT |
| | | GAGGAGTGCCTGAACGTGATGAGCATCGAGGAGATGTTCAAGCTGAATTATT |
| | | TTAATGTGGTGCTGACACAGAAGCAGATCGACGTTTATAACGCCATCATTGG |
| | | CGGCAAGACCATCGATAATACTAACATCAAAATCAAGGGGCTGAACGAATA |
| | | CATCAACCTCTACAACCAGCAGCAGAAGGATAAGAGCGCCCGGCTGCCAAA |
| | | GCTGAAACCTCTGTACAAGCAGATCCTGAGCGACCGTAACGCCATCAGCTGG |
| | | CTCCCTGAACAGTTTGAGTCTGATGACAAACTCCTGGAGGCCATTCAGAAGG |
| | | CTTATCAGGAGCTGGATGAGCAGGTGCTGAACAGAAAGATCGAGGGGGAGC |
| | | ACAGCCTGAGGGAACTGTTAGTCGGGCTGGCCGATTACGACCTGTCCAAGAT |
| | | CTACATCAGAAACGACCTGCAGTTGACTGACATTTCCCAGAAAGTCTTCGGC |
| | | CATTGGGGCGTGATTAGCAAAGCCCTGCTGGAGGAGCTGAAGAACGAGGTG |
| | | CCTAAGAAGAGCAAAAAGGAGTCCGATGAGGCCTACGAAGACCGTCTGAAC |
| | | AAGGTCATCAAATCACAGGGCAGCATCTCCATTGCGTTCATTAACGACTGCA |
| | | TCAACAAGCAGCTGCCCGAAAAACAGAAGACTATCCAGGGCTACTTCGCAG |
| | | AGCTGGGAGCCGTGAACAACGAGACTATCCAGAAGGAGAACCTGTTCGCCC |
| | | AGATTGAAAATGCCTACACAGAGGTGAAGGACCTGCTGAATACTCCATATAC |
| | | AGGAAAGAACCTCGCTCAGGACAAGGTGAATGTCGAGAAAATTAAAAACCT |
| | | GCTGGACGCCATCAAGGCACTGCAGCACTTCATTAAGCCCCTGTTGGGCGAC |
| | | GGAACCGAGCCTGAGAAGGACGAGAAATTTTATGGAGAGTTTGCTGCCCTGT |
| | | GGGAGGAGCTGGATAAAATCACCCCCCTGTATAATATGGTGAGAAACTACAT |
| | | GACCAGAAAGCCTTACTCAACCGAGAAAATCAAGCTGAACTTCGAAAATTCC |
| | | ACTCTGATGGATGGCTGGGATCTGAACAAGGAACAGGCTAATACTACAGTGA |
| | | TCCTGAGGAAGGACGGCCTCTACTACCTAGCCATTATGAACAAGAAGCACAA |
| | | CAGAGTGTTTGATGTGAAGGCCATGCCAGACGATGGGGACTGCTACGAAAA |
| | | GATGGAGTACAAGCTGCTGCCCGGCGCTAACAAAATGCTGCCCAAGGTGTTT |
| | | TTCAGCAAGTCCAGGATCCAGGAGTTCGCCCCAAGCTCTCAGCTGCTGGAGA |
| | | ATTACCACAACGACACCCACAAGAAGGGCGTGACATTCAACATCAAGGACT |
| | | GCCACGCCCTGATCGACTTCTTCAAAGCCTCCATTAACAAGCACGAGGATTG |
| | | GTGCAAGTTCGGATTCAGATTCTCTCCCACCGAGACCTACGAGGACCTGTCT |
| | | GGCTTCTACAGGGAGGTGGAACAGCAGGGCTACAAGATCAGCTTCAGAAAT |
| | | GTGTCCGTGGACTATATCCACTCCCTGGTGGAGGAGGGAAAAATCTTCCTGT |
| | | TCCAGATCTACAACAAGGACTTCAGCCCATACAGTAAGGGGACACCCAATCT |
| | | GCACACACTGTACTGGAAGATGCTGTTCGACGAGAAGAATCTGGCCGACGTG |
| | | GTGTACAAGCTGAACGGCCAGGCCGAGGTGTTCTTTAGAAAGAGCAGCATTA |
| | | ATTACGAGCAACCTACACACCCAGCCAATAAGGCAATCGACAATAAGAACG |
| | | AACTGAACAAGAAGAAGCAGAGCCTGTTTACATACGACCTGATCAAGGATA |
| | | AGCGGTACACTATTGATAAATTCCAGTTTCACGTCCCAATCACCATGAACTTC |
| | | AAGTCTACCGGTAACGATAACATCAATCAGAGCGTGAACGAGTACATCCAGC |
| | | AGTCAGACGACCTGCATATTATCGGGATCGACAGGGGCGAAAGGCACCTGCT |
| | | GTACCTGACTGTGATCAACCTGAAGGGCGAAATTAAGGAGCAGTACAGTCTG |
| | | AACGAGATCGTGAACACCTACAAGGGCAATGAGTACCGGACTGACTATCAT |
| | | GACCTGCTGAGCAAGAGAGAGGATGAGAGAATGAAAGCCAGGCAGAGCTGG |
| | | CAGACCATCGAGAACATTAAAGAGCTGAAGGAGGGCTACCTGTCTCAGGTC |
| | | GTGCACAAGATCGCTGAGCTGATGATCAAGTACAATGCAATTGTGGTGCTGG |
| | | AGGACCTGAATGCCGGCTTCATGAGGGGCAGACAGAAGGTGGAGTCCTCTGT |
| | | GTACCAGAAATTCGAGAAGATGCTGATCGATAAGCTGAATTACCTGGCCGAC |
| | | AAGAAGAAACAGCCCGAGGAGCCCGGCGGGATCCTGAACGCCTACCAACTG |
| | | ACTAACAAATTCGTGTCCTTCCAGAAGATGGGTAAGCAGTGTGGGTTCCTGT |
| | | TCTACACCCAGGCTTGGAACACAAGTAAGATTGACCCTGTGACTGGCTTCGT |
| | | GAATCTCTTCGACACACGGTACGAGACTAGGGAGAAGGCCAAGACTTTCTTC |
| | | GGCAAGTTCGACTCCATTAGGTACAATGATGAGAAGGATTGGTTCGAGTTTG |
| | | CTTTTGATTATACTAACTTCACTAGCAAGGCCGACGGTTCTAGGACCAACTG |
| | | GAAACTGTGTACATATGGCAAGAGGATCGAGACCTTCAGAGATGAGAAGCA |
| | | GAACTCTAACTGGACTAGCAAGGAGGTGGTGCTGACCGACAAATTTAAAGA |
| | | GTTCTTCAAAGAGAGTAATATCGACATCCACAGCAACCTGAAGGAGGCTATC |
| | | ATGCAGCAGGACAGCGCCGATTTTTTCAAGAAGCTGCTGTATCTGCTGAAGC |
| | | TTACCCTGCAGATGAGAAACTCCGAAACCGGTACAAACGTGGATTACATGCA |
| | | GAGCCCCGTGGCCGACGAGGAGGGCAACTTCTATAACTCTGATACCTGCGAC |
| | | TCCAGCCTGCCAAAGAATGCCGACGCGAATGGGGCCTACAACATCGCCAGA |
| | | AAGGGTCTGTGGATCGTGCAGCAGATCAAGACATCCGACGATCTGAGAAATC |
| | | TGAAGCTGGCCATTACCAACAAGGAATGGCTGCAGTTTGCCCAGAGGAAGCC |
| | | CTACCTGGACGAGTGA |
| 207 | 167 | ATGGGCACACTGAAGCAGTTCACCAGGGTTTACCCTTTGTCCAAGACCCTGC |
| | | GGTTTGAACTGAAACCCATTGGCAGAACCCTGGAATTCATTAACTCCTCCGG |
| | | CCTGCTGGAACAGGACCAGCACAGGGCAGACTCCTATATCAAGGTCAAGGG |
| | | GATCATCGACGAGTACCACAAGGCCTTCATCGAGACCGTGCTGAACGACTTT |
| | | AAGCTGAATTACACCGACGAGGGCAAGAAGAACAGCTTGGAAGAATTTTAC |
| | | ACCTGCTATATGTGCAAGGCAAAAGATGAGGCCCAGAAAAAGCTGTTTGAG |
| | | GAAATACAGGGGAAGCTGCGAAAGCAGATCGCCGACTGCTTTTCCAAAGAT |
| | | GACAAGTTCAAGCGCATCGACAAGAAGGAGCTGATTAAGGAGGACCTGGTG |
| | | AATTTCGTGACCAACCAGGAGGACAGACTGCTCATCGATGAGTTCCGGGATT |
| | | TCACCACCTACTTTACCGGCTTCCACGAAAATCGGAAGAACATGTACAGTGC |
| | | TGAGGCCCAGAGCACCGCCATCGCTTACAGGCTGATCCACGAGAACCTGCCA |
| | | AAATTCATTGACAATATGCTGGTGTTTGACAAGGTGGCCGCTTCCCCCGTGA |
| | | GCGAGCACTTCGTAGGCCTGTATAGCAATTTCGAAGAGTACCTGAATGTGAT |
| | | GAATATCGCCGAGATGTTCAGACTGGACTACTTCAATATCGTGCTGACTCAG |
| | | AAGCAGATCGATATTTATAATTACATCATCGGTGGCAGAACCCTTGACGATG |
| | | GGACCAAGATTAAAGGCCTGAACGAGTATATCAATCTGTACAACCAGCAGC |
| | | AGAAGGACAAGAGCGTGAGGCTGCCTAAGCTGAAACCACTGTACAAACAGA |
| | | TCTTGAGCGATAGAAACGCCATCAGCTGGCTGCCCGAGCAGTTCGAAAGCGA |
| | | CGAGAAGGCCCTGGAAGCAATCCAGAAGGCCTACCAGGAACTGGACGAGCA |
| | | GGTGTTTAACAGAAATAAAGAAGGCGAGCACTCCCTGAAGGAGCTGCTGCA |
| | | GACCCTCGCCGAATACGACCTGGACAAAATCTATATCAGGAACGATCTGCAG |
| | | ATGACCGATATCTCACAGAAAGTGTTCGGCCATTGGGGCATCATTAGCAAAG |
| | | CGCTGCTGGAGCAGCTGAAGAAGGAGCTGCCGAAGAAATCCAAAAAGGAGA |
| | | CTGATGAAGCCTATGAGGAAAGACTGAACAAGGTGCTGAAGAGCCAGGGGT |
| | | CAATTTCCATCGCCCAGATCAACAATAGTGTGTGGGTTATGGGCATGGAGGA |
| | | GCAGAATTCCATCCAGGCCTATTTCGCCCGGCTGGGCGCCGTGAATACAGAA |
| | | ACCGTGCAGCAGGAGAACATCTTCTCTCACATCGAGAATGCTTACACAGAGG |
| | | TGAAGGATCTGCTGAATACCCCTTACCCCCTGAATAAGAACCTGGCCCAGGA |
| | | CAAGGTGAATGTGGAGAAAATCAAAAATCTGCTCGACGCCATTAAGTCTCTG |
| | | CAGCACTACGTGAAGCCCCTGCTGGGCGATGGCACCGAGTCCGAGAAAGAT |
| | | GAGAAGTTCTACGGAGAGTTTGTGGCCCTGTGGGAGGATCTGGACAAGATCA |
| | | CACCCCTGTACAACATGGTGAGGAATTACATGACCAGGAAACCCTATAGTAC |
| | | AGAGAAGATCAAACTGAACTTCGAAAATAGCACACTGATGGACGGCTGGGA |
| | | CCTGAACAAGGAGCAGGCCAACACCACAGTGATCCTGAGGAAGGACGGGCT |
| | | GTATTACCTGGCTATCATGAATAAAAAACATAACAGGGTGTTCGACGTGAAA |
| | | AACATGCCTGAGAGCGGCGACTGCTATGAGAAAATGGAGTACAAACTGCTG |
| | | CCTGGCGCCAATAAGATGCTGCCTAAAGTGTTCTTTTCTAAGAGCAGGATTA |
| | | ATGAGTTTGCTCCTAGCGAGCAGCTGATGGCTAATTACCGCAATGAGACTCA |
| | | CAAGAAGGGCGCCAGCTTCAACATCCACGACTGCCACGCCCTGATCGACTTT |
| | | TTTAAAAGCTCAATCAATAAACATGAAGACTGGTCCAGATTTGGGTTCCACT |
| | | TTAGCGATACCAACACCTACGAGGACCTGTCCGGCTTCTACCGCGAGGTGGA |
| | | GCAGCAGGGCTATAAGATTTCCTTCAGGAATGTGAGCGTGGACTACATTCAC |
| | | AGCCTGGTGGAGGAAGGCAAGATCTACTTGTTCCAGATCTACAATAAGGACT |
| | | TCTCCCCCTACAGCAAGGGGACCCCCAATCTGCATACTCTGTACTGGAACAT |
| | | GATGTTCGACGAGCGGAACCTGGCAGATGTGGTGTACAAGCTCAACGGCCA |
| | | GGCCGAGGTGTTCTTCAGGAAATCCAGCATTACCTGCGAGAGGCCTACTCAC |
| | | CCCGCCAATCAGGCCATTGAGAATAAGAACGCACTGAACGAGAAGAAGCAG |
| | | AGCGTGTTTACATACGACCTGATCAAGGATCGGCGCTATACCGTGGACAAAT |
| | | TTCAGTTCCACGTGCCTATCACCATGAATTTTAAGTCAACCGGAAACGACAA |
| | | TATCAATCAGTCCGTGAATGAATACATCCAGAAGTGTGACGACCTGCATATC |
| | | ATCGGGATCGACAGAGGCGAGCGCCACCTGCTGTACCTGACCGTGATTGACA |
| | | TGAAGGGCCAGATTAAAGAGCAGTACAGCCTGAACGAGATCGTGAACACAT |
| | | ACAAGGGCAATGAGTACAGGACCAATTACCACGAGCTGCTGAGCAAGAGAG |
| | | AAGACGAGAGGATGAAAGCCCGGCAGTCTTGGCAGACCATTGAGAACATCA |
| | | AGGAGCTTAAGGAGGGCTACCTGAGCCAAGTGATCCATAAGATCTCCGAGCT |
| | | GATGGTTAAATACAACGCCATCGTGGTGCTGGAGGATCTGAACATGGGTTTC |
| | | ATGAGGGGCAGGCAGAAAGTGGAGGCCAGCGTGTATCAGAAGTTCGAAAAA |
| | | ATGCTGATCGACAAGTTGAACTACCTCGCCGACAAAAAGAAAAATCCCGAG |
| | | GAGGAAGGAGGGATCCTGAACGCTTATCAGCTGACTAACAAGTTCACCTCTT |
| | | TCCAGAAAATGGGTAAACAGAGTGGCTTCCTGTTCTATACTCAGGCCTGGAA |
| | | CACCTCCAAGATTGACCCTGTTACAGGGTTCGTGAACCTGTTCGACACCCGA |
| | | TATGAGACAAGGGAGAAGGCCAAAGTGTTCTTCTGCAAGTTCGATTCTATCC |
| | | GCTACAACCGCGATAAGGATTGGTTCGAGTTTGCATTCGACTACAACAAGTT |
| | | CACCACTAAGGCTGAGGGGACCCACACCCAGTGGATCCTCTGCACCTACGGC |
| | | AAAAGGATGGAGACCTTCCGGGATGAAAAGCAGAATAGCCAGTGGACTTCC |
| | | CAGGAGTGCGGCCTGACAGACAAATTCAAAGAGTTCTTTGCCAAGTACGGCA |
| | | TCGATATTCATACTAACCTGAAGGAGGCTATCGCTCAGCAAGACTCCGCCGA |
| | | CTTCTTCAAAGGGCTGCTGTATCTGCTGAAACTGACCCTGCAGATGAGAAAT |
| | | AGCAAAACCGGAACTGACATAGATTACATGCAGAGCCCTGTGGCCGACGCA |
| | | AACGGAAATTTCTACAATAGCGAGCTGTGTGACAATAGCCTGCCCAAGAATG |
| | | CCGACGCCAACGGCGCCTATAACATTGCCAGGAAGGGCCTGTGGATCGTGAG |
| | | GCAGATCAAGGCCTCAGATGATCTGAGGAACCTGAAGCTGACCATTAGTAAT |
| | | AAGGAGTGGCTGCAGTTCGCCCAGAATAAGCCATACCTGAATGACTGA |
| 208 | 168 | ATGAGCACCTATAGCGATTTCACTGGGCTGTACACTCTGTCCAAAACGCTAC |
| | | GATTTGAGCTGAAGCCTATCGGAAAAACCAAGGACAATATAGAACGGAATG |
| | | GCATATTAGACCGGGATAGCCAGAGAGCCATTGGATATAAGGCGATCAAGA |
| | | AGGTGATAGATGAGTACCATAAAGCCTTTATCGAATTGATGCTGGATAGCTT |
| | | CGAACTGAAGCTTAAAGACGAAGGTAGAATGGACAGTCTGATGGAGTTCTAT |
| | | TATCTGTACCATCTGCCTACCATTGATAGCAAAAGGAAGGATGACCTGAAGA |
| | | AAGTGCAGGAGGCCTTGCGTAAGCAGATATCCGAGTGCTTTACGAAAAGCG |
| | | AACAATATAAGCGGCTGTTTGGGAAGGAACTGATCAGAGAGGACCTGGCGG |
| | | ACTTCATCAAGACACCCAAGTATGAGGGAGTAATTAGATCCCAGCATGATAA |
| | | CGAGGACCTTACAGAGGAGGAGATTCGAAAGATTCAGGAAGAAGTGGAGAA |
| | | GACCATAGACCAATTCTATGACTTCACTACCTATTTCGTGGGTTTCTATGACA |
| | | ACCGTAAGAACATGTATGTGGCCGACGATAAGGCAACCTCAATTGCACATCG |
| | | GATGATTACCAAGAACCTCCCAAAGTTTATCGATAATATGGATGTCTTTGCG |
| | | AAGATCTCTTCCTCAGAGGTTGCCACGCACTTCGAAACTCTTTACAAAGAGA |
| | | TGGAGGCTTACTTGAACGTAAACTCCATCGAGGAAATGTTCCAGTTAGATTA |
| | | CTTTAGCATGGTCCTTACACAAAAGCAGATTGACGTGTACAATTCAATCATC |
| | | GGAGGAATGGTCCTAGAAAACGGGACGAAAATTCAGGGCTTAAATGAGTAT |
| | | GTTAACCTGTATAACCAGCAGCAGAAAGATAAAGGCAACCGCTTACCCAAAT |
| | | TGAAACCCCTCTTTAAACAAATTCTCAGTGAAAGGAACGCTATAAGTTGGCT |
| | | GCCAGAGGAGTTTGAGTCAGACAATGACATGCTTGATGGTATTGAGAGGTGT |
| | | TATCAGGACCTGAAGAAACAAGTCTTCAATGGAGAGAACAGCATGCAGGTG |
| | | CTCCTGAAAAGCATTGGTGATTATGATCTGGAGCATATCTACCTGCCGAACG |
| | | ATCTCCAGCTGACCGACATCGCCCAGAAGTATTATGGGTCTTGGTCGGTGAT |
| | | CAAGAAAGCAATGGAGGAGGACGTGAAAGCCAATAACCCACAGAAACGGA |
| | | ATGACACCGGCGAAAAATACGAAGAGAGGATCACTAAGTTACTCAAGTCTA |
| | | AAGAGTCTATCAGCATTGAGGAAATCAATCGCCTGATGAAATGGCTGTTGGG |
| | | CGACGATTATAAACCAATGGAGAATTACTTCTCCATGATGGGCGCTGAGGAT |
| | | GATGAGAATGGTCAGAAACCTGATCTTTTCATTAGAATTGAGAACGCCTACA |
| | | CTGAGGCAAAAGCACTCTTGACTTCAGTTTACCCAGAAGATAGGAAATTGAG |
| | | CCAAGATAAGAAGAATGTGGAGCGGATTAAAAATCTCCTCGACGCAATTAA |
| | | AGATCTGCAGCGTTTCGTCAAACCTCTCCTGGGCGGCGGAACAGAATCAGAA |
| | | AAAGATCCAAGGTTCTACGGAGAGTTCGTGCCTATGTGGGAGGCACTGGACC |
| | | AGATCACACCGCTTTACAACATGGTCAGGAATCGTATGACACAGAAACCCTA |
| | | CAGTGAAGAAAAGATTAAACTGAACTTCGACACTCCCACCCTTCTGAAAGGG |
| | | TGGCCCGATGCCCAAGCATCCTCCGGTGCCATCCTGAAAGATAATAAGGGGC |
| | | TATACTACCTGGCTATTTTGGATTCCATGCATAGGACATGTCTGAACGAACTC |
| | | AAGTCCTGCCCCACTGAAAAGAGTGAAATGGCGATTATGAAATATCTGCAGG |
| | | GCGGTGACATGGAAAAAAATGTGCAAAATCTGATGCGCATCAATGGCGTGA |
| | | CTCGCAAGGTGAACGGACGGAAGGAAAAGGAGGGAGCAATGGTTGGCCAGA |
| | | ACATTAGACTCGAGAATGCAAAGAACACCTATCTTCCTACAGAGATCAATGA |
| | | TATCCGCCTTAAGCAATCATACCTTACTTCGAGTCAGAGCTTTAATAAGCAG |
| | | GACCTGGCCCTATACATCGAGTATTACATGCCATTGGTAAGGGAATACTACA |
| | | GCGACTACCAGTTTTCCTTTAGGAATCCCTCGGAGTACAAATCTTTTGCTGAA |
| | | TTTACCGACCACATCAATCAGCAAGCTTATCAGGTGCAGTTTGGCAGCATCT |
| | | CCGACAAGCAGTTATTCCAGATGGTCGAGGAGGGGAAGATATATCTGTTCCA |
| | | GATTTACAACAAGGACTTTTCCCCTTATTCCAAGGGGACGCCCAATATGCAC |
| | | ACGCTCTACTGGAAGATGCTGTTCGATGAGCGAAATTTGGCTGATGTGGTAT |
| | | ATAAGCTCAATGGCGAAGCTGAAGTCTTCTTCAGAAAGCACTCTATAGAAGT |
| | | TGGCAGACCGACCCATCCCGCGAATAAGCCTATCGAGAACAAAAATAAGCT |
| | | GAACGAGAAGAAGATTTCAGTCTTTGCCTACGATTTGTTAAAAGACAGGCGT |
| | | TACACTGTCGATAAGTTCCAGTTCCATGTACCAATAACCATGAACTTTAAGG |
| | | CCGCAGGGCTAAATAACATCAATCCACTGGTGAATGCTTATCTGAAGGAGTC |
| | | TAAAGCCACACACATCATAGGTATAGACAGAGGTGAACGGCACCTTCTTTAC |
| | | CTGAGTCTCATCGACTTACAAGGGAACATCGTGGAGCAATACAGTCTTAACG |
| | | AAATCGTCAATGAGTACAACGGGAATACATATCGCACTAACTATCACGACCT |
| | | CTTGGATGCCAAGGAAAAGCAACGAGACGAAGCAAGAAAGTCTTGGCAGAC |
| | | CATCGAGAATATAAAAGAACTTAAGGAGGGCTACATGTCCCACGTGATCCAT |
| | | AAGATCGCAGAACTCATGGTGAAGTACAACGCCGTTGTGGTTCTGGAAGACC |
| | | TGAAACCGGGGTTTATGCGCGGCAGACAGAAAGTCGAGAAGCAGGTGTACC |
| | | AGAAATTTGAGAAAATGCTGATAGACAAGCTGAACTATCTCGTGGACAAAA |
| | | AACTAGAAGCTACCGAAATGGGGGGGGTTCTCAACGCTTACCAGCTCACAAA |
| | | TAAGTTTGAAAGTTTTCAGAAGCCTGGGAAGCAAAGCGGGTTTTTATTTTAC |
| | | ATACCTGCCTGGAACACATCTAAAATGGATCCCACTACGGGCTTCGTTAATTT |
| | | GCTCGATACCCGCTATGAAAATATGGCTAAGGCTAAGGCTTTCTTCGGCAAG |
| | | TTCAAATCAATTCGGTACAATGCCACCAAAGACTGGTTCGAGTTCGCCTTTG |
| | | ACTACAACAACTTCCACAACCGCGCCGAGGGAACCCGAACACAATGGGCTC |
| | | TGTGCACCTATGGTACCCGGATCGAGACTAAGCGGGATCCCAAACAGAACA |
| | | ACAGCTTTGTCTCTGAAGAGTTTGACCTGACATCTAAGTTCAAGAAGCTGCT |
| | | AGCCCACTACGCGATTGACCTTAACGGCAATCTACTGGAGCAGATTTGTAGC |
| | | CAGAACGACACTCAGTTTTATAAGGACTTACTCCACCTACTCCACCTGACACT |
| | | GCAGATGCGGAATTCTATCACCGGCACAGACGTGGATTATCTGGTGTCGCCA |
| | | GTAATGAACGTTTACGGAGAGTTCTATGATTCAAGGACCTGCGGCAACAATC |
| | | TCCCTAAAAACGCGGACGCCAACGGAGCCTACAACATTGCTCGAAAAGGATT |
| | | GTGGATCATCGAACAGATTAAACAGACAGAAGATTTGAGTAAGCTCAAGTTG |
| | | GCCATTTCTAACAAAGAGTGGATGAGATACGCACAAGGACTGCGCTGA |
| 209 | 169 | ATGAAGACCCTGAAAAACCTGACAGGGCTGTACAGCCTGTCCAAGACTCTGC |
| | | GGTTCGAGCTGAAACCCATCGGCAAGACTAAAGAGAACATCGAGAAGAACG |
| | | GAATCCTGGAAAGGGACAATGAAAGAGCTATCGCCTATAAAGCTGTCAAGA |
| | | AAGTGATCGACGAGTACCACAAGGCTTTTATTGAGCTGATGCTGGACGACTT |
| | | TGAGCTGAACAAGGACACCCTGAACGAATTCTACTATCTGTATCACCTGCCT |
| | | ACTTCTGAGGCCAAGCGCAAGACCGATCTGCCAAAGGTGCAGGAGGTGCTG |
| | | AGAAAGCAGATCAGTGAAAGGTTCACAAAAAGCGAGCAGTTCAAGAGGCTG |
| | | TTTGGGAAGGAGCTGATCAGGGAAGACCTGGTGGAATTCGTCAAGACCCCTC |
| | | AGTACGAGAATATCATTAGGAAGATGCCAGGGAACGAGCAGTTGACCGACA |
| | | AGGAGGTTAAGCAGATCCAGGAGCGGGTGCAAAAGGACATCGCCCAGTTTG |
| | | ATGATTTCACCACCTATTTCTCCGGCTTTTATGATAACAGGAAAAACATGTAG |
| | | GTGCCCGAGGACATTGCCACAAGCATTGCCCACAGAATGATCGGGGAGAAT |
| | | CTGCCGAAGTTCATTGATAACATGGACGTGTTCGCCAGAATAGCCGCTAGCG |
| | | ACGTCGCCACACATTTCGACGAGCTGAATAAGGCCATGGAGCTGTACCTGAA |
| | | CGTGAACGAGATCCCAGAGATGTTCCAGCTGGACTATTTCCACATGGTGCTO |
| | | ACTCAGAAGCAGATCGACGTGTATAATGCCATTATCGGCGGGAAGGTGCTGG |
| | | ATGATGGCACGAAGGTGCAGGGGCTGAATGAATACGTGAATCTGTACAATC |
| | | AGCAGCAGAAGGATAAGAGCAAGCGGCTGCCCAAGCTGAAGCCACTGTTTA |
| | | AGCAGATTCTGAGCGAAAGAAACGCCATCTCTTGGCTGCCCGACGAGTTTGA |
| | | CTCCGACAACGAGATGCTGCAGAGCATCGGCAAGTGCTACCACGACCTGAA |
| | | AGAACAGGTGTTTGGCTCCCTGAAGACTCTGCTGGGATCCATCAAGGACTAT |
| | | GACCTGGAGCACATCTACCTGCCCAACGATCTGCAGCTGACCGATATCGCTC |
| | | AGAAGCACTTCGGCGACTGGTCTGTGATTAAGAATGCAGTCATCGAGAACCT |
| | | GCAGAGCGTGAATCCTAAGAAGAAAAGAGAGAATGGAGAAAATTACGATGA |
| | | ACGGATCCTGAAGCTGCAGAAAGCCAACGATTCCTACAGCATCGGCTTCATC |
| | | AATGCCCTGCTGAGGAGCAAGACCGATGACTTTAACCCACTGGAGAATTATT |
| | | TCGCCGGAATGGGAGCCGAAGACAATGAAAATGGCCAGAAACTGAATCATT |
| | | TCGCTAGGATTGAGAACGCTTATACAGAAGTGAAGACCCTGCTGAACGCCGA |
| | | TTATCCAGAGGGCAAGTCACTGAGCCAGGACAAAGCCAATGTGGAGAAGAT |
| | | TAAGAACCTGCTGGACAGTATCAAGGATCTGCAGCACTACGTGAAGCCCCTG |
| | | CTGGGCTCAGGCATGGAGTCTGACAAGGACAATAGATTTTACGGGGAGTTCA |
| | | CCCCACTGTGGGAAGCACTGGATCAGATCACACCACTGTATAACATGGTGAG |
| | | GAACAGAATGACCCAGAAGCCATACTCCGATGAGAAAATTAAGCTCAACTTC |
| | | GACAATTCCACCCTGCTGGCCGGGTGGGACCTGAATAAGGAAGCAGACAAC |
| | | ACTTGCACTCTCCTGAGGAAGGACGGGAACTATTACCTGGCCATCATTAACA |
| | | AGAGGTCCAACAAAGTGCTGAAGCCAGAGAACCTGATCAGCGATGGCGATT |
| | | GCTACGAAAAGATGGAGTACAAGCTGCTGCCAGGGGCCAACAAAATGCTGC |
| | | CAAAGGTCTTCTTTTCCAAATCTCGGATTGATGAGTTCAAGCCCAGCGAAAG |
| | | TGTGCTGAAGAACTACCAGAAGGAGACACATAAGAAGGGGGACAACTTCAA |
| | | CCTGGATGACTGCCACGCCCTGATCGATTTTTTTAAGGAGAGCATCAATAAG |
| | | CATGAGGACTGGAGCAAGTTCGGCTTTCACTTCAGCGACACCAATAGCTACG |
| | | AGGACCTGTCCGGGTTTTACAGAGAGGTGGAACAGCAGGGATACAAGATCA |
| | | GCTTTAGGAACGTGAGCGTGAACTACATCAATCAGCTGGTGGACGAGGGGA |
| | | AGATCTACCTGTTCCAGATCTACAACAAAGACTTCTCTCCTTACTCCAAGGGC |
| | | ACCCCTAACATGCATACCCTGTACTGGAGGATGCTCTTCGATGAGAGGAATC |
| | | TGGCCGATGTGGTGTATAAGCTGAACGGAGAGGCAGAAGTGTTTTTCCGGAA |
| | | ACACTCAATTAGAGTGGATAAACCCACTCACCCTGCCAATAAGCCCATCGCC |
| | | AATAAAAACGCACAGAATGAGAAGAAGGAGAGTATCTTCACCTACGATCTG |
| | | GTGAAGGACCGGAGATACACCGTGGACAAGTTCCAGTTTCACGTCCCCATCA |
| | | CCATGAATTTCAAGGCCGCCGGGCTGAACAATATCAATCCCCTGGTGAACGC |
| | | CTATCTCAAAGAGTCCAATAGCACCCACATTATCGGCATAGACCGCGGCGAA |
| | | AGACACCTGCTGTACCTGTCCCTGATCGACATGAAAGGCAACATCGTGGAAC |
| | | AGTACACCCTGAATGAGATCGTGAATGAGTACAAGGGAAATACCTACCGGA |
| | | CCAACTATCACGACCTGCTGGATGCAAAGGAAAAACAGCGCGACGAAGCCA |
| | | GACGCTCCTGGCAGACCATTGAGAACATTAAGGAGCTGAAGGAGGGCTATA |
| | | TGTCCCAGGTGATCCACAAGATCGCCGAGCTGATGGTGAAACACAATGCCAT |
| | | TGTGGTGCTCGAGGACCTTAACATGGGCTTTATGCGAGGGAGACAGAAAGTG |
| | | GAGAAACAGGTGTACCAGAAGTTTGAGAAGATGCTGATCGATAAGCTGAAT |
| | | TACCTCGTGGATAAGAAACTGGACGCCGAGGAGATGGGGGGCGTGTTGAAC |
| | | GCCTACCAGCTGACAAATAAATTCGAGGGCTTTCAGAAGCTGGGCAAACAGT |
| | | CCGGCTTTCTGTTCTACATTCCCGCCTGGAACACCTCTAAAATGGACCCGACA |
| | | ACCGGATTTGTGAACCTGTTCGACACCAGATATGAGAACATGGAGAAGTCAA |
| | | AGGTGTTCTTCGGCAAGTTTGACAGCATCAGATATAATAGCGCCAAGGGTTG |
| | | GTTTGAGTTCGCCTTCGACTATGGGAATTTTACAGCTAAGGCCGAAGGCACC |
| | | CGCACCAACTGGACCCTGTGCACATACGGCACCCGGATCGAAACCAAGAGA |
| | | AATCCCGAGAAAAATAACGAGTTCGACTCAGTCGAGATTGACCTGACTGAGC |
| | | AGTTCAAAGCCCTGTTCGCCAAGCATCAGATCGACCTGAGCGGTAACCTGAA |
| | | GGAGCAGATCTGCAATCAGTCCGATGCCAGCTTTCATAAAGAGCTGCTGCAC |
| | | CTGCTGCACCTGACCCTGCAAATGCGGAACAGCGTCACAAACAGCGAAGTG |
| | | GACTTCCTGCTGTCCCCCGTGATGAACGCCAGCGGCGAGTTCTATGACTCAA |
| | | GAACCTGGGGGAAGAACCTGCCAGAGAATGCCGACGCCAACGGCGCTTACA |
| | | ATATCGCCAGAAAGGGACTGTGGATCATTGAGCAGATCAAGAACACCAACG |
| | | ACAATGACCTGGCCAAGATCAAGCTGGCTATCAGCAATAAGGAGTGGCTTAG |
| | | GTACGCCCAGGGACTGGACTGA |
| 210 | 170 | CTGAAAAACAAATATTACGTTTGCATCTTCATTAAGAAGACTATCAACTCCA |
| | | TTATCAATCTGAAGGAGACTAACAAAATGAAGAAGTTCAGCGATTTTACCAA |
| | | CGTGTACCCAGTGTCCAAGACCCTGAGATTTGAGCTCAAGCCAATCGGGAAG |
| | | ACCCAGGAGAACCTGGGCAAAATTATCGATGAAGACAATCAGAGAGCCAAG |
| | | GATTATAAGGTGGTGAAGAAAGTGATTGACGAGTACCACAAGGCCGTGATO |
| | | GAGCAGCTGCTGAACGGGTTCGAGCTGGACAAAGACACCCTGGAGAAGTTT |
| | | AAAGATCTGTACCATCTGTCCATCAGCGAGCCTAAGAGAAAGGATCTGCCTA |
| | | AGGTGCAGGAAGTGCTGCGGGAACAGATTTCCAAGCGGTTTATCAAGAGTG |
| | | AGCAGTATAAGCGGCTGTTCGGAAAGGAGCTGATCCAGGAGGACCTGCCAG |
| | | AGTTCGTGTATTCTTCAAAATACGGCGACGTCATCAGGAAGCAACACGAGAA |
| | | GGAACACCTGTCAGACGACGATATCAACCGCGAGAGGAAAAGAATCTGCGA |
| | | TGAGATCGCCCAGTTTGATGACTTTACCTCTTACTTTGGCGGATTTCACGAGA |
| | | ACCGGAAGAACATGTACGTTGCAGACGATAAAGCCACTAGCATCGCTCACA |
| | | GACTGATCAATGAGAACCTGCCAAAGTTCGTCGATAACATGGACGTGTTTGC |
| | | CAAAATCGCCGCATCAGACGTGGCCCAGCACTTTGATAAGCTGTATAAGGAG |
| | | ATGGAGCCTTACCTGAACGTGGGCGCAATCTCTGAAATGTTCGAGATCGGGT |
| | | ACTTCAGCACCGTCCTGACCCAGAAGCAGATCGATGTTTACAACGCCATCAT |
| | | CGGCGGTAAGGTGGAGGAGGACGGCAGGAAGATCCAGGGTCTGAACGAGTA |
| | | CATCAATCTGTATAACCAGCAGCAGAAGGATAAGGCAAACAGGCTGCCCAA |
| | | GCTGAAGCCCCTGTTCAAACAGATCCTGAGCGATCGCAATGCCATTAGCTGG |
| | | CTGCCCGAAGAATTCGAGTCAGACAACGACATGCTCCAGAGGATCGAGGAG |
| | | TGCTACCAGAATCTCAAGGAGCAGGTGTTTGACTCCCTGAAGACCCTGCTGG |
| | | CCAACATCAAGGAGTACGACATTGCCCACATCTACCTCCCTAATGACCTGCA |
| | | GCTGACCGATATCTCTCAGAAGCATTTTGGAAGCTGGTCTGTGATCAAGAAC |
| | | GCCGTGATCGAAAAGGTGAAAGCCGAGAATCCCCAGAAGAAGAAAGAGTCC |
| | | GGCGAGAAATACGAGGAGAGGATCGCCAAGGAGCTGAAACACTACGATAGC |
| | | CTGACAATCGGATTCCTGAACGATCTGCTGAAGAATCAGGTGGGCTTCACCC |
| | | CTATTGAGATGTATTTCGCTAATATGGGCGCCGAGGACAACGAAAACGGGCA |
| | | GCAGGTGAACCACTTCGTGCGTATCGAGAATGCTTATACCGACATCTGCCAG |
| | | CTTCTGAGCACTGAGTATAAAGGGGATTCCCTGGCCCAGGACAAAAAGAAC |
| | | GTGGAAAAGATTAAGAACCTGCTGGATGCAATCAAAAACCTGCAGCACTTCG |
| | | TGAAGCCCTTGCTGGGGAAGGGCAACGAATCCGAGAAGGATAATCGCTTCTA |
| | | CGGGGAATTCACACCACTGTGGGAAATGCTGGACCAGATCACCCCCCTCTAT |
| | | AATATGGTGAGGAACAGGATGACCAAAAAGCCTTACTCAGAGGAGAAAATC |
| | | AAGCTGAACTTCGAGAACTCACAGCTGCTGAAAGGCTGGGACCTGAACAAA |
| | | GAGGTGGCCAACACCTGTACCATGCTGAGAAAGGACGGCAATTACTACCTGG |
| | | TGATCATGAATAAAAAGCACAATACTGTGCTGCAGCCCGGCAAGCTGGTGAG |
| | | CGACGGGGACTGCTACGAGAAGATGGAATACAAGCTGCTGCCTGGGGCCAA |
| | | CAAGATGCTGCCTAAGGTGTTCTTTAGCAAGAGCAGAATTGGCGAGTTCAAT |
| | | CCCTCCGAGAGGATCATTAATAACTACAACAACAACACTCATAAGAAGGGG |
| | | GATACATTTAACCTGGACGATTGCCACGCCCTCATCGACTTCTTCAAGACCA |
| | | GCATTAACAAGCATGAAGACTGGTCCAAATTCGACTTTAAATTTAGCGATAC |
| | | TAACACATACTCTGATCTGAGCGGATTTTACCGGGAGGTGGAGCAGCAGGGC |
| | | TACAAAATCGCCTTCAGAAACGTGAGCGTGCAGTACATCGATCAGCTGGTGG |
| | | ACGAGGGGAAGATTTATCTCTTCCAGATTTACAACAAAGATTTCTCCCCCTAC |
| | | AGCAAGGGCACCCCAAACATGCATACACTGTACTGGAGGGCCCTGTTCGACG |
| | | AGAAGAACCTGGCCAATGTGGTGTATAAGCTGAATGGGGAAGCCGAGGTGT |
| | | TTTTCAGAAAGCATTCTCTGCCATACAAGCCTACACACCCTGCCAACCAGCCT |
| | | ATCGCAAATAAGAACTCTCAGAACAAAAAGAAGGAGAGCACATTCGCCTAC |
| | | GACCTGATTAAGGACCGGCGATACACTCTGGACAAGTTCCAGCTGCACGTGC |
| | | CCATCACTATGAACTTTAAGGCCGCCGGCATCAACAATATCAACCTGATGGT |
| | | CAAGGATTATCTGAAGGAATCTGACGCCACCCACATCATCGGCATCGACAGA |
| | | GGCGAGCGCCACCTGCTGTACCTGTCTGTGATCAACATGAAGGGGGAGATCG |
| | | TGGAGCAGTACTCACTGAACGAGATCGTGAACGAGTATAACGGCAATACCTA |
| | | CAGAACTAATTACCACGACCTGCTGGACGCCAAAGAGAAACAGCGCGATGA |
| | | GGCACGCAGGAGCTGGCAGACCATCGAAAACATCAAGGAACTCAAGGAGGG |
| | | CTATATGTCCCAGGTGGTGCACAAAATCGCCCAGCTGATGGTGAAATATAAG |
| | | GCTATCGTGGTGCTGGAGAATCTGAACATGGGCTTCATGCGCGGCCGGCAGA |
| | | AGGTGGAGAAACAGGTGTACCAGAAATTTGAGAAGATGCTCATCGATAAGC |
| | | TCAACTACCTGGTCGACAAACAGTGCGCCATCGACGAAGAAGGCGGGATCCT |
| | | GCACGCCTATCAGTTAACCAACAAGTTTGAGAGCTTCCAGAAAATAGGCACC |
| | | CAGTCCGGCTTCCTGTTTTACATCCCAGCCTGGAATACATCCAAGATGGACCC |
| | | TACAACAGGCTTCGTGAACCTGTTTGACACCAGATATGAAAACATGGAGAAA |
| | | GCCCGCCTGTTCTTCGCCAAGTTCGATTCCATCCGGTATAATACAAATCAGAA |
| | | CTACATCGAGTTTGCCTTCGACTACGACAATTTCACCTCCAAGGCCGAGGGG |
| | | ACTAAGACAAAATGGACTCTGTGTACCTACGGCACTCGCATCGAGACCAAAA |
| | | GGAATCCAGACAAGAACAACGAGTTCGACAGCATCGAACTGAATCTGACCG |
| | | AGCAGTTCAAGGCCCTGTTCACTACATACCATATCGACATCACCGGAAATCT |
| | | GAAGGAGCAGATCTGCAATCAGAACGACGCAACTTTCTACAAGGGGTTGCTG |
| | | CACCTGCTGCACCTCACCCTGCAGATGCGAAACAGTGTGACCGGAACAGCAA |
| | | CAGACTACCTGCTGTCTCCTGTGATGAACAATAAGGGGGAGTTTTTTGACAG |
| | | CCGGAAATGCGGCAAGAACCTGCCAGAGAATGCAGATGCCAACGGCGCCTA |
| | | CAACATCGCCAGAAAAGGGCTGTGGGTGATTGAGCAGATTAAACAGGCCGA |
| | | GGACCTGTCCAACATCGACCTGGCCATCAAGAACAAGGAGTGGATGCAGTTC |
| | | GCCCAGAAGAACAGGTGA |

TABLE S9C
Direct Repeat Group 9

| SEQ | | SEQ | |
|---|---|---|---|
| ID | Direct Repeat | ID | Direct Repeat |
| NO | (Variant #1) | NO | (Variant #2) |
| 211 | GGCTACTAAGCCTTTATA | 212 | GCTACTAAGCCTTTATAA |
| | ATTTCTACTATTGTAGAT | | TTTCTACTATTGTAGAT |
| 213 | ATCTACAATAGTAGAAAT | 214 | ATCTACAATAGTAGAAAT |
| | TAATTGAGTCAATTAGAC | | TAATTGAGTCAATTAGAC |
| 215 | ATCTACAATAGTAGAAAT | 216 | ATCTACAATAGTAGAAATT |
| | TAAAATGGCTTTATAGCC | | AAAATGGCTTTATAGCCA |
| 217 | ATCTACAATAGTAGAAAT | 218 | ATCTACAATAGTAGAAAT |
| | TCAAATGGCTTTATTGCC | | TCAAATGGCTTTATTGCC |
| 219 | GTCTAAAGGACTCAAATA | 220 | GTCTAAAGGACTCAAATA |
| | ATTTCTACTATTGTAGAT | | ATTTCTACTATTGTAGAT |
| 221 | GTCTAACAGATTGGAATA | 222 | GTCTAACAGATTGGAATA |
| | ATTTCTACTATTGTAGAT | | ATTTCTACTATTGTAGAT |
| 223 | ATCTACAATAGTAGAAAT | 224 | ATCTACAATAGTAGAAAT |
| | TTATAGTCTCTTTTAGAC | | TTATAGTCTCTTTTAGAC |
| 225 | GGCTATAAGCCTTGTATA | 226 | GGCTATAAGCCTTGTATA |
| | ATTTCTACTATTGTAGAT | | ATTTCTACTATTGTAGAT |
| 227 | GGCTATAAGCCTTATATA | 228 | — |
| | ATTTCTACTATTGTAGAT | | |
| 229 | GTCTATAGAGGCTCAATA | 230 | GTCTATAGAGGCTCAATA |
| | ATTTCTACTATTGTAGAT | | ATTTCTACTATTGTAGAT |
| 231 | GGCTATAAGTCTGTATAA | 232 | GGCTATAAGTCTGTATAA |
| | TTTCTACTTAGTGTAGAT | | TTTCTACTTAGTGTAGAT |
| 233 | GCCTATAAAGGCACAATA | 234 | GCCTATAAAGGCACAATA |
| | ATTTCTACTATTGTAGAT | | ATTTCTACTATTGTAGAT |
| 235 | ATCTACGATAGTAGAAAT | 236 | ATCTACGATAGTAGAAAT |
| | TAACTTGGCTTTATAGCC | | TAACTTGGCTTTATAGCC |
| 237 | GGCTATAAAGCCAATTTA | 238 | GGCTATAAAGCCAATTTA |
| | ATTTCTACTATTGTAGAT | | ATTTCTACTATTGTAGAT |
| 239 | ATCTACAATAGTAGAAATT | 240 | ATCTACAATAGTAGAAAT |
| | TTATTTGTCATTTAGACT | | ATTTATTTGTCTTTAGAC |
| 241 | ATCTACAACAGTAGAAAT | 242 | ATCTACAACAGTAGAAAT |
| | TATTGAGGCCTTATAGCC | | TATTGAGGCCTTATAGCC |
| 243 | GTCTATAAGACGATTCTA | 244 | GTCTATAAGACGATTCTA |
| | ATTTCTACTATTGTAGAT | | ATTTCTACTATTGTAGAT |
| 245 | GTCTATAAGGCCTCAATA | 246 | GTCTATAAGGCCTCAATA |
| | ATTTCTACTATTGTAGAT | | ATTTCTACTATTGTAGAT |
| 247 | GGCTAATAAGTCGATGTA | 248 | GGCTAATAAGTCGATGTA |
| | ATTTCTACTATTGTAGAT | | ATTTCTACTATTGTAGAT |
| 249 | GGCTAATAAGTCGATGTA | 250 | GGCTAATAAGTCGATGTA |
| | ATTTCTACTATTGTAGAT | | ATTTCTACTATTGTAGAT |
| 251 | GGCTAATAAGCCAGTGGA | 252 | GGCTAATAAGCCAGTGGA |
| | ATTTCTACTATTGTAGAT | | ATTTCTACTATTGTAGAT |
| 253 | ATCTACAATAGTAGAAAT | 254 | ATCTACAATAGTAGAAAT |
| | TAAATTGGCTTGTTAGCC | | TAAATTGGCTTGTTAGCC |
| 255 | GGCTATAAAGCCATAACA | 256 | GGCTATAAAGCCATAACA |
| | ATTTCTACTATTGTAGAT | | ATTTCTACTATTGTAGAT |
| 257 | GGCTAGTAAGCTTCAATAA | 258 | GGCTAGTAAGCTTCAATA |
| | TTTCTACTATTGTAGATT | | ATTTCTACTATTGTAGAT |
| 259 | ATCTACGATAGTAGAAAT | 260 | ATCTACGATAGTAGAAAT |
| | TATCAAGTCCTTATAGAC | | TATCAAGTCCTTATAGAC |
| 261 | ATCTACGATAGTAGAAAT | 262 | ATCTACGATAGTAGAAAT |
| | TATCAAGTCCTTATAGAC | | TATCAAGTCCTTATAGAC |
| 263 | ATCTACAATAGTAGAAAT | 264 | ATCTACAATAGTAGAAAT |
| | TACTTAGGCTTTATAGCC | | TTACTTAGGCTTATAGCC |
| 265 | GTCTAAGACAGCATTTAA | 266 | ATTTAAATTTCTACTATT |
| | ATTTCTACTATTGTAGAT | | GTAGAT |
| 267 | GGCTATAAGCCTTATTAA | 268 | GGCTATAAGCCTTATTAA |
| | ATTTCTACTATTGTAGAT | | ATTTCTACTATTGTAGAT |
| 269 | ATCTACAATAGTAGAAAT | 270 | ATCTACAATAGTAGAAAT |
| | TATAAAAGTCATTTAGAC | | TATAAAAGTCATTTAGAC |
| 271 | ATCTACAATAGTAGAAAT | 272 | ATCTACAATAGTAGAAAT |
| | TTAATTAGGCGAGTAGCC | | TTAATTAGGCGAGTAGCC |
| 273 | GTCTGAAAGACACATATA | 274 | GTCTGAAAGACACATATA |
| | ATTTCTACTATTGTAGAT | | ATTTCTACTATTGTAGAT |
| 275 | ATCTACAATAGTAGAAAT | 276 | ATCTACAATAGTAGAAAT |
| | TATAAAATTACTATAGCC | | TATAAGATTACTATAGCC |
| 277 | ATCTACGATAGTAGAAAT | 278 | ATCTACGATAGTAGAAAT |
| | TATAAAATTACTATAGCC | | TATAAAATTACTATAGCC |
| 279 | GTCTAATTGACTTTATTA | 280 | GTCTAATTGACTTTATTA |
| | ATTTCTACTGTTGTAGAT | | ATTTCTACTGTTGTAGAT |
| 281 | ATCTACAATAGTAGAAAT | 282 | ATCTACAATAGTAGAAAT |
| | TATAATAGTCTTATAGAC | | TATAATAGTCTTATAGAC |
| 283 | ATCTACAATAGTAGAAAT | 284 | ATCTACAATAGTAGAAATT |
| | TATCCAAGTCCTATAGAC | | ATCCAAGTCCTATAGACT |
| 285 | CTCTATGAGGCACATTTA | 286 | CTCTATGAGGCACATTTA |
| | ATTTCTACTATTGTAGAT | | ATTTCTACTATTGTAGAT |
| 287 | GTCTATAAGACTTAAGTA | 288 | GTCTATAAGACTTAAGTA |
| | ATTTCTACTTTTGTAGAT | | ATTTCTACTTTTGTAGAT |
| 289 | ATCTACAATAGTAGAAAT | 290 | GTTGTTCGCGACTGCAAA |
| | TTAATCAGCTTTATAGCC | | TGTATAAAACTTTGAAAG |
| | | | CAATTCACAAC |

TABLE S9D
crRNA Sequences Group 9

| SE | | |
|---|---|---|
| QID | | |
| NO | Sequence | FIG |
| 291 | GGCUACUAAGCCUUUAUAAUUUCUACUAUUGUAGAU | FIG. 9A |
| 292 | GUCUAAUUGACUCAAUUAAUUUCUACUAUUGUAGAU | FIG. 9B |
| 293 | GGCUAUAAAGCCAUUUUAAUUUCUACUAUUGUAGAU | FIG. 9C |
| 294 | GGCAAUAAAGCCAUUUGAAUUUCUACUAUUGUAGAU | FIG. 9D |
| 295 | GUCUAAAGGACUCAAAUAAUUUCUACUAUUGUAGAU | FIG. 9E |
| 296 | GUCUAACAGAUUGGAAUAAUUUCUACUAUUGUAGAU | FIG. 9F |
| 297 | GUCUAAAAGAGACUAUAAAUUUCUACUAUUGUAGAU | FIG. 9G |
| 298 | GGCUAUAAGCCUUGUAUAAUUUCUACUAUUGUAGAU | FIG. 9H |
| 299 | GGCUAUAAGCCUUAUAUAAUUUCUACUAUUGUAGAU | FIG. 9I |
| 300 | GUCUAUAGAGGCUCAAUAAUUUCUACUAUUGUAGAU | FIG. 9J |
| 301 | GGCUAUAAGUCUGUAUAAUUUCUACUUAGUGUAGAU | FIG. 9K |
| 302 | GCCUAUAAAGGCACAAUAAUUUCUACUAUUGUAGAU | FIG. 9L |
| 303 | GGCUAUAAAGCCAAGUUAAUUUCUACUAUCGUAGAU | FIG. 9M |
| 304 | GGCUAUAAAGCCAAUUUAAUUUCUACUAUUGUAGAU | FIG. 9N |
| 305 | AGUCUAAAUGACAAAUAAAAUUUCUACUAUUGUAGA | FIG. 9O |
| | U | |
| 306 | GGCUAUAAGGCCUCAAUAAUUUCUACUGUUGUAGAU | FIG. 9P |
| 307 | GUCUAUAAGACGAUUCUAAUUUCUACUAUUGUAGAU | FIG. 9Q |
| 308 | GUCUAUAAGGCCUCAAUAAUUUCUACUAUUGUAGAU | FIG. 9R |
| 309 | GGCUAAUAAGUCGAUGUAAUUUCUACUAUUGUAGAU | FIG. 9S |
| 310 | GGCUAAUAAGUCGAUGUAAUUUCUACUAUUGUAGAU | FIG. 9T |
| 311 | GGCUAAUAAGCCAGUGGAAUUUCUACUAUUGUAGAU | FIG. 9U |
| 312 | GGCUAACAAGCCAAUUUAAUUUCUACUAUUGUAGAU | FIG. 9V |
| 313 | GGCUAUAAAGCCAUAACAAUUUCUACUAUUGUAGAU | FIG. 9W |
| 314 | GGCUAGUAAGCUUCAAUAAUUUCUACUAUUGUAGAU | FIG. 9X |
| 315 | GUCUAUAAGGACUUGAUAAUUUCUACUAUCGUAGAU | FIG. 9Y |
| 316 | GUCUAUAAGGACUUGAUAAUUUCUACUAUCGUAGAU | FIG. 9Z |
| 317 | GGCUAUAAAGCCUAAGUAAUUUCUACUAUUGUAGAU | FIG. 9AA |
| 318 | GUCUAAGACAGCAUUUAAAUUUCUACUAUUGUAGAU | FIG. 9BB |
| 319 | GGCUAUAAGCCUUAUUAAAUUUCUACUAUUGUAGAU | FIG. 9CC |
| 320 | GUCUAAAUGACUUUUAUAAUUUCUACUAUUGUAGAU | FIG. 9DD |
| 321 | GGCUACUCGCCUAAUUAAAUUUCUACUAUUGUAGAU | FIG. 9EE |
| 322 | GUCUGAAAGACACAUAUAAUUUCUACUAUUGUAGAU | FIG. 9FF |
| 323 | GGCUAUAGUAAUUUUAUAAUUUCUACUAUUGUAGAU | FIG. 9GG |
| 324 | GGCUAUAGUAAUUUUAUAAUUUCUACUAUCGUAGAU | FIG. 9HH |
| 325 | GUCUAAUUGACUUUAUUAAUUUCUACUGUUGUAGAU | FIG. 9II |
| 326 | GUCUAUAAGACUAUUAUAAUUUCUACUAUUGUAGAU | FIG. 9JJ |
| 327 | GUCUAUAGGACUUGGAUAAUUUCUACUAUUGUAGAU | FIG. 9KK |
| 328 | CUCUAUGAGGCACAUUUAAUUUCUACUAUUGUAGAU | FIG. 9LL |
| 329 | GUCUAUAAGACUUAAGUAAUUUCUACUUUUGUAGAU | FIG. 9MM |
| 330 | GGCUAUAAAGCUGAUUAAAUUUCUACUAUUGUAGAU | FIG. 9NN |

### Group 10 Sequences (SEQ ID Nos: 331-367)

TABLE S10A
Enzyme Sequences Group 10 (SEQ ID Nos: 331-336)

| SEQ | |
|---|---|
| ID | |
| NO | Sequence |
| 331 | LLFIIEFEEKIMKTIENFCGQKNGYSRSITLRNRLIPIGKTEENIEKLQLLDNDIKRSK |
| ID411 | AYVEVKSMIDDFHRAFIEEVLSKAKLEWGPLYDLFDLFQNEKDKHKKSKIKKELE |
| | TIQGVMRKQIVKKFKDDDRFDKLFKKEILTEFVPTVIKADESGTISDKRAALDVFK |
| | GFATYFTGFHQNRQNMYSEEAKATAISNRIVNENFPKFYANVKVFECLQKEYPAII |
| | TETEEALSEILNGKKLADIFSADGFNSVLSQSGIDFYNTIIGGIAGEAGTQKLQGINE |
| | KINLARQQLPTEEKNKLKRKMSVLYKQILSDRSTASFIPIGFESSDEVYESVKQFKE |
| | QSLDNVISAAKELFEKSDYDLSQIYVPAKEVTDFSLKLFGNWSILHDGLFLIEKDN |
| | SKKTFTEKQIENLRKEIAKTDCSLADLQNAYERWAKENDVKAEKTVKNYFKIAEL |
| | RADGKSREKTSVEILNKIESTFEKIDFEKRDNLIKEKETATPIKEFLDEVQNLYHYL |
| | KLVDYRGEEQKDTDFYSKYDEILQTLSEIVPLYNKVRNFVTKKPNEVKKVKLNFD |
| | NVSLAKGWDVNKESDYTCILLRRSGLYYLGVLNPKDKPKFDSENNGETSINKND |
| | CYEKLVYKYFKDVTTMIPKCSTQLNDVKQHFKNSNEDYILENNNFIKPLVISKRIF |
| | DLNNKTFDEKKMFQIDYYRNTGDLKGYTEAVKDWISFCMTFVHSYKSTCIYDFSS |
| | LGDCSQFKQVDQFYKEINLLLYKIWFVNVTAEKINSLVDSGKLFLFQIYNKDYSTG |
| | KDGGNGSTGKKNLHTMYWENLFSEENLRDVCLKLNGDAELFWRDANPDVKDV |
| | CHKKGSVLVNRTTSDGETIPEEIYQEIYKFKNPNKQEKSFKLSDTAKELLDSGKVG |
| | FKEAKFDIIKDRHFTQKTYLFHCPITMNFKAPEITGRKFNEKVQQVLKNNPDVKVI |
| | GLDRGERHLIYLSLINQKGEIELQKTLNLVEQVRNDKTVSVNYQEKLVQKEGERG |
| | KARKNWQTISNIKELKEGYLSNIVHEIAKLMVENNAIVVMEDLNFGFKRGRFAVE |
| | RQVYQKFENMLIEKLNYLVFKDKKVAEPGGVLNAYQLTDKVANVSDVGKQCG |
| | WIFYIPAAYTSKIDPKTGFANLFYTAGLTNIEKKKDFFDKFDSIRYDRKTDSFVFTF |
| | DYSDFGDNADFKKKWELYSRGERLVFSKAEKSVVHVNPTENLKALFDKQGINWS |
| | SEDNIIDQIQAVQAERENCAFYDGLYRSFTAILQMRNSVPNSSKGEDDYLISPVMA |
| | EDGSFYDSREEAEKGKTTDGKWISKLPVDADANGAYHIALKGLYLLQNNFNLNE |
| | NGYIENISNADWFKFVQEKEYAK |
| 332 | MVISYTFGGKKMKAVEKFCGQKNGYSRSITLRNRLIPIGKTEENIQKLKLLDKDM |
| | ERAKAYDEVKKLIDEFHRTFIEEVLSKASFEWAPLYDQFDLFQTEKDKLKKNKIK |
| | KELEVLQGVMRKKIVESFKKDKRFEKLFKKELLTEFVPAVIKNDESGTITDKQAA |
| | LNVFKGFATYFTGFHQNRQNMYSEEAQSTAISNRIVNENFPKFYANVKVFEYLKN |
| | NYPEIINETEKALEEFLNEKKLADIFSPENFNAVMSQSGIDFYNTVIGGIADEAGTK |
| | KLQGLNEKINLASQQLPSEEKYKLKKKMTILYKQILSDRNTASFIPVGFEKSEEVY |
| | ESVKHFKEEILDKVITNTKKLFDSVDYDLGQIYVPAKEVTEFSLKLFGNWSIIHNG |
| | MFLLEQDMAKKVLSEKQIEALKKEIAKRDLSLSDLQNAYERWTKENDVKAEKNV |
| | RNYFKLTELRVDEKTKEKDSIEILKNLEVLYSKIDFEKQENLIQEKTSATPIKDYLD |
| | EIQNLYHYLKLVDYRGEEQKDTDFYSKYDEIIQTLSEIIPLYNKVRNFVTKKPNEIK |
| | KVKLNFDCPTLANGWDLNKESSNDAIILRKNGNYYLGIFNPKDKPKFEYNNEDSG |
| | YEKMIYKLLPGPNKMLPKVFFSAKGLETFRPPKDLVLGYEEGKHKKGDNFDKVF |
| | MHKLIDWFKYAINQHEDWKNFNFKFSPTEFYEDMSGFYKEVELQGYKITFNKVS |
| | DNCINSLVDSGKLFLFQIYNKDYSTGEEGGNGSTGKKNLHTLYWENLFSEENLRD |
| | VCFKLNGEAEFFWRDANPNVKAVCHKKDSVLVNRTTSDGKSIPEEIYQEIYKYKN |
| | PEKQEKEFTLSKDAKELLESGTVVCKKAKFTITKDRHFTQQTYLFHCPITMNFKAP |
| | EITGRKFNEHVQEILRNNPEVKVIGLDRGERHLIYLSLINQKGEIELQKTLNLVEQV |
| | RNDKTVSVNYQEKLVHKEVERDKARKSWQSISNIKELKEGYLSNIVHEIAKLMVE |
| | NNAIVVMEDLNFGFKRGRFPVERQVYQKFENMLIEKLNYLVFKDKNVTEPGGVL |
| | NAYQLADKAVNVSDVGKQCGWIFYIPASYTSKIDPKTGFANLFYTAGLTNIEKKK |
| | DFFDKFDSIRYDRKLDSFVFGFDYSNLSDNADYNKKWELYSRGERLVYSKAEKST |
| | ISVNPTENLKVLFDKQGIVWDSKDNFIDQIHAVQAERDNVPFYDGLYRSFTAILQ |
| | MRNSVPNSSKQEDDYLISPVMADDGNFYDSRLEAAKGKDEKGNWISKLPVDADA |
| | NGAYHIALKGLYLLKNDFNLNEKGYIENISNADWFKFVQNKEYQDC |
| 333 | MKTIDSFCGQNEGYSRSITLRNKLIPIGETEKNIKEFLEKDVERSEAYPQIKKLIDDI |
| | HRGFIEECLSNVSFPWEPLFDQFELYQNEKEKIKKNAKKKELIVLQVAARKRIVKA |
| | FKDNKDFEKLFKEELFKELLPQLIKSAPVTEIADKEKALSVFTRFSTYFNGFHENRK |
| | NMYSEEEISTGIAYRIVNENFPKFFSNIKLFEYLKDNFPEIIKETEISLKDTLKGKKLC |
| | DIFKVEAFNNVLSQSGIDFYNTIISGVAGEGGTQKIKGMNEIINLAKQQLPKEEKDK |
| | LHGKMVVLFKQILSDRETASFIPTGFEKNEEVYASIKEFNNIIVKDSVTETRNLFAL |
| | NSDIKLNEIIVPAKSITAFSLTIFGNWVIISEGLYLLEKDKITKALSEKQEEQLHKDID |
| | KKDCNLEEIQSAYERWCSENGEIVRTSVRKYFNLIETQSSSSENTSTKKEVCILDEI |
| | TKSFSQIDFENEKDLQQEKEAATPIKIYLDEVQNLYHHLKLVDYRGEEQKDSNFYS |
| | KFDEIIEKLSEIISIYNKVRNFVTKKPGEVKKVKLNFDCPTLANGWDENKEKDNDA |
| | ILLLKDGNYYLGIYNPKNKPKFDFEESKASDCYKKVVYKLLPGPNKMLPKVFFSA |
| | KGQKEFLPPKELLLGYEEGKHKKGENFDKEFMYKLIDWFKDAINRHEDWKKFDF |
| | KFSDTRSYEDMSAFYKEVELQGYKISFKKVSTEIINEFVNSSKLFLFQIYNKDFAVK |
| | ATGKKNLHTLYWENLFSEENLKDICFKLNGEAELFWRKASLIKEKVTVHKKNSILI |
| | NRTKKDGSTIPENLYQEIYQYKNNMISDISENAKDLLNSGKVICKKATHDITKDKH |
| | FTEDAYLFHCPITMNFKAPEITGRKFNDKVLEALKENPEIKIIGLDRGERHLIYLSLI |
| | NQKGEIELQKTLNLVDQIRNDKTVQINYQEKLVQNEGDRDKARKNWQTIGNIKE |
| | LKEGYLSAIIHEIATLMIENNAIVVMEDLNFGFKHGRFAVERQVYQKFENMLIEKL |
| | NYLVFKDRSIKEPGGVLNAYQLTDKAANVSDVYKQCGWLFYIPAGYTSKIDPKT |
| | GFANLFVTKGLTNVEKKKDFFSKFDSIYYDEKEACFVFAFDYSKFGDNADFKKK |
| | WEVYTKGERLVYSKQERKSITVSPTEELKKIFNEFSINWNNSESVLDQIKTIPAEKL |
| | NAKFFDTLLRAFNATLQMRNSVPNSSRQEDDYLISPVKARDGTFYDSRIEAEKGID |
| | KNGRWVSKLPVDADANGAYHIALKGLYLLENNFNRNEKGVIQNISNVEWFKFAQ |
| | TK |
| 334 | MARIIDEFCGQMNGYSRSITLRNRLVPIGKTEENLKQFLEKDLERATAYPDIKNLID |
| ID405 | AIHRNVIEDTLSKVALNWNEIFNILATYQNEKDKKKKAAIKKDLEKLQSGARKKI |
| | VEAFKKNPDFEKLFKEGLFKELLPELIKSAPVDEIAVKTKALECFNRFSTYFTGFHD |
| | NRKNMYSEEAKSTAISYRIVNENFPKFFANIKLFNYLKEHFPRIIIDTEESLKDYLK |
| | GKKLDSVFSIDGFNSVLAQSGIDFYNTVIGGISGEAGTKKTQGLNEKINLARQQLS |
| | KEEKNKLRGKMVVLFKQILSDRETSSFIPVGFANKEEVYSTVKEFNNSIAEKAVSK |
| | VRDLFLHREEFTLNEIFVPAKSLTDFSQAIFGSWSILSEGLFLLEKDSMKKALSESQ |
| | EEKINKEIAKKDCSFTELQLAYERYCTEHNLPVEKFCKDYFDIVDYRGNGAKSEK |
| | TKVSILSEILETFLQLDFDHIQDLQQEKNAAIPIKAYLDEVQNLYHHLKLVDYRGE |
| | EQKDSTFYSKHDEILTDLSQIVPLYNKVRNFVTKKLGESKKIKLNFDCPTLANGW |
| | DENQESSNDAIILRKDGKYYLGIYNPNNKPKFAKKDSIVGDCYEKMAYKQIALPM |
| | GLGAFVRKCFGTAQKYGWGCPENCLNSEGKIIIKDEEAKGNLEAIIDCYKDFLNK |
| | YEKDGFKYKDYNFSFLDSASYEKLSDFFNDVKPQGYKLSFTSIPLSEIDKMIDEGK |
| | LFLFQIYNKDFAKKATGKKNLHTLYWENLFSVENLQDVVLKLNGEAELFWREAS |
| | IKKDKVIVHKKGSILVNRTTTDGKSIPEAIYQEIYQLKNKMADSISDEAKRLLESGT |
| | VVCKVATHDIVKDKHFTENTYLFHCPITMNFKAKDRINKEFNNHVLEVLNKNPDI |
| | KVIGLDRGERHLLYLSLINQKGEIECQKTLNLVEQVRNDKTVSVNYHEKLVHKEG |
| | SRDAARKNWQTIGNIKELKEGYLSAVVHEIASLMVKHNAIVVMEDLNFGFKRGR |
| | FAVERQIYQKFENMLIEKLNYLVFKDRKVTEPGGVLNAYQLANKSAKVTDVYKQ |
| | CGWLFYIPAAYTSKIDPRTGFANLFITKGLTNVEKKKEFFGKFDSIRYDATESCFVF |
| | SFDYAKICDNADYKKKWDVYTRGTRLVYNKTERKNVSVNPTEELQCVFDEFGIK |
| | WNTGEDLIESISLIPAEKSNAKFFDVLLRMFNATLQMRNSVPNTDTDYLVSPVKAE |
| | DGSFFDSREEFKKGGDARLPIDCDANGAYHIALKGLYLLLNDFNRDNKGVIQNIS |
| | NKDWFKFVQEKVYKD |
| 335 | MATIENFCGQENGYSRSITLRNKLIPIGKTANNLKQFLEKDQERADVYPEIKKLIDE |
| ID406 | IHRGFIEDTLSKFSFVWEPLFDDFELYQNEKDKSKKATKKKDLEKFQSGARKKIVE |
| | AFKKHPDYDKLFKDGLFKELLPALIKNSSDSEISNKEEALKVFDRFSTYFVGFHEN |
| | RKNMYSEEDKSTAISYRIVNENFPKFYANVKLYNYIKENFPKIISETEESLKNHLNG |
| | KRLDEIFNAESFNDVLAQSGIDFYNTVIGGISTETEKVQGLNEKINLARQKLPAEEK |
| | NKLRGKMVVLFKQILSDRGTSSFIPVGFNNKEEVYSSVKSFNDEFVNISVCETKEL |
| | FKQVAEFNLSEIYVPAKSLTNFSQNIFGSWSILTEGLFLLEKDKVKKALSENKEEKI |
| | NKEIAKKDYSLDELQVAYERYCNEHNFSVEKNCKDYFDVVDYRSENEKSDKKKI |
| | SILSAITESYSKIDFENIHDLQQEKEAATPIKTYLDEVQNLYHHLKLVDYRGEEQK |
| | DSNFYSKLDEIITQLSEIIPLYNKVRNFVTKKPGEMKKIKLNFDCPTLANGWDENK |
| | ESSNDAIILRKDGKYYLGIFNPNNKPKFSKIENISESYYEKMVYKLLPGPNKMLPK |
| | VFFSTKGQETFLPPKDLLLGYDAGKHKKGDAFDKEFMYKLIDWFKDAINRHEDW |
| | KKFNFVFSPTKSYEDMSGFYREVELQGYKVSFQKISDTEINSFVSNGKLFLFQIYN |
| | KDFALKASGKKNLHTLYWENLFSEENLKDVCLKLNGEAELFWRKPSLNKEKVTV |
| | HEKGSILVNRTTNDGKSIPEDIYQEIYQFKNKMKDKISDNISIQNDDGKVITITVTLE |
| | NKQKEKFTENYKVVYKTATHYITKDNRFTEDTYLFHCPITMNFKAPDKSNKEFNN |
| | HVLEVLSGNPNVKIIGLDRGERHLIYLSLINQKGEIELQKTLNLVEQVRNDKTVKV |
| | NYQEKLVHKEDDRDKARKSWQTIGNIKELKEGYLSNVVHEIAKMMVEHNAIVV |
| | MEDLNFGFKRGRFAVERQIYQKFENMLIEKLNYLVFKDKKVTEPGGVLNAYQLT |
| | NKSANVSDVYRQCGWLFYIPAAYTSKIDPKTGFANLFITKGLTNVEKKKEFFDKL |
| | DSIRYDSKEDCFVFGFDYGKICDNADFKKKWEVYTKGERLVYNKTERKNININPT |
| | EELKSIFDDFGINWNNEENFIDSVHTIQAEKSNAKFFDTLLRMFNATLQMRNSIPN |
| | TEIDYLISPVKSEDGTFFDSREELKKGENAKLPIDADANGAYHIALKGLYLLENDF |
| | NRNDKGVIQNISNADWFKFVQEKEYRD |
| 336 | MTTINKFCGQGNGYSRAITLRNKLIPIEKTADNLKQFLEKDQERADSYPEIKKLIDE |
| | VHRGFIEDTLTKFSFVWEPLFDDFELYQNEKDKSKKAAKKKDLEKFQSGARKKIV |
| | EAFKKHPDYDKLFKDGLFKELLPALIKNSSDSEISNKEEALKVFDRFSTYFVGFHE |
| | NRKNMYSEEEKFTAISYRIVNENFPKFYANVKLYNYLKENFPQIISETEESLKNHL |
| | NEKKLDEIFNVESFNDVLAQSGIDFYNTVIGGISTETEKVQGLNEKINLARQKLPAE |
| | EKNKLRGKMVVLFKQILSDRGTSSFILVDFNNKEEVYSSVKSFNDEFVNLSVCETK |
| | ELFKQVAEFNLSEIYVPAKSLTNFSQNIFGSWSILTEGLFLLEKDKMKKALSENQE |
| | EKINKEIAKKDYSLDELQVAYERYCNEHNFSVEKNCKDYFDVVDYRSENEKSDK |
| | KKVSILSAITESYSKIDFENIHDLQQEKEAATPIKTYLDEVQNLYHHLKLVDYRGE |
| | EQKDSNFYSKLDEIITQLSEIIPLYNKVRNFVTKKPGEMKKIKMMFDCSSLLGGWG |
| | TDYGTKEAHIFIDSGKYYLGIINEKLSKDDVELLKKSSERMVTKVIYDFQKPDNKN |
| | TPRLFIRSKGTNYAPAVSQYNLPIESIIDIYDRGLFKTEYRKINPEVYKESLIKMIDY |
| | FKLGFERHESYKHYPFCWKESSKYNDIGEFYKDVINSCYQLHFEKVNYDNLLKLV |
| | ENNKIFLFQIYNKDFAEKKSGKKNLHTLYWENLFSEENLKDVCLKLNGEAELFWR |
| | KPSLNKEKVTVHKKGSILVNRTTNDGKSIPEDIYQEIYQFKNKMIDNLSENAKSLL |
| | DSGVVVCKEATHNITKDNRFTEDTYLFHCPITMNFKAPDKSNKEFNNQVLEVLSD |
| | NPDVKIIGLDRGERHLIYLSLINQKGEIELQKTLNLVDQVRNDKTVKVNYQEKLV |
| | HKEGDRDKARKNWQTIGNIKELKEGYLSNVVHEIAKMMVEHNAIVVMEDLNFG |
| | FKRGRFAVERQIYQKFENMLIEKLNYLVFKDKKVTEPGGVLNAYQLINKSANVS |
| | DVYRQCGWLFYIPAAYTSKIDPKTGFANLFITKGLTNVEKKKEFFDKFDSIRYDSK |
| | EDCFVFGFDYGKICDNADFKKKWEVYTKGERLVYNKTERKNISINPTEELKSIFDD |
| | FGINWNNEDNFIDSVHTIQAEKSNAKFFDTLLRMFNATLQMRNSIPNTEIDYLISPV |
| | KSEDGTFFDSREELKKGENAKLPIDADANGAYHIALKGLYLLENDFNRNDKGVIQ |
| | NISNADWFKFVQGKEYEK |

TABLE S10B
Human Codon Optimized Nucleotide
Sequences Group 10

| SEQ | Corres- | |
|---|---|---|
| ID | ponding | |
| NO | AA | Sequence |
| 338 | 332 | ATGGTGATTAGCTACACATTTGGGGGCAAGAA |
| | | AATGAAGGCTGTGGAGAAATTTTGCGGCCAGA |
| | | AAAATGGATACAGTCGGTCGATTACTCTGCGT |
| | | AATAGGCTGATCCCTATTGGGAAAACCGAAGA |
| | | GAACATTCAAAAACTCAAGCTCCTCGATAAAG |
| | | ATATGGAGCGCGCTAAGGCTTATGACGAAGTC |
| | | AAGAAACTCATAGATGAGTTCCACAGGACATT |
| | | TATTGAAGAAGTCCTTTCAAAGGCTTCCTTTG |
| | | AGTGGGCACCACTTTACGACCAGTTTGATCTG |
| | | TTTCAAACCGAGAAGGATAAGCTGAAGAAGAA |
| | | CAAGATCAAGAAAGAGCTGGAAGTGCTCCAAG |
| | | GGGTGATGAGGAAGAAAATCGTAGAGTCTTTC |
| | | AAGAAGGATAAAAGGTTCGAAAAACTGTTCAA |
| | | GAAGGAGTTGCTGACAGAGTTCGTTCCTGCAG |
| | | TCATTAAGAATGACGAATCTGGTACAATTACA |
| | | GATAAGCAGGCCGCACTAAATGTCTTCAAAGG |
| | | GTTTGCGACCTATTTTACAGGGTTTCACCAGA |
| | | ATCGGCAGAACATGTATAGCGAAGAGGCCCAG |
| | | TCTACCGCGATCTCTAATCGGATTGTGAATGA |
| | | GAACTTCCCTAAGTTTTACGCCAACGTGAAGG |
| | | TCTTCGAGTACCTTAAAAATAACTACCCAGAG |
| | | ATCATAAACGAGACAGAAAAGGCACTTGAGGA |
| | | GTTCCTAAATGAAAAGAAACTGGCTGATATCT |
| | | TCAGTCCCGAGAACTTTAACGCCGTGATGTCC |
| | | CAGTCAGGCATAGACTTCTATAACACCGTGAT |
| | | TGGGGGTATTGCGGATGAAGCTGGCACCAAGA |
| | | AGCTCCAAGGTTTGAACGAAAAAATTAATCTG |
| | | GCCTCCCAGCAGTTACCGAGCGAGGAGAAGTA |
| | | CAAGCTAAAGAAGAAAATGACGATTCTGTACA |
| | | AACAGATTCTTTCCGACCGAAATACAGCTTCA |
| | | TTCATACCCGTAGGTTTCGAAAAAAGTGAAGA |
| | | AGTATATGAGAGCGTCAAACATTTCAAAGAGG |
| | | AGATTCTGGACAAGGTGATTACCAACACCAAG |
| | | AAATTGTTCGACTCAGTGGATTATGATCTGGG |
| | | CCAAATCTATGTTCCTGCAAAGGAAGTAACCG |
| | | AGTTTTCCCTTAAGCTGTTTGGAAACTGGTCT |
| | | ATCATACATAATGGGATGTTTCTGTTGGAGCA |
| | | GGATATGGCCAAAAAAGTATTGTCAGAAAAAC |
| | | AGATCGAGGCACTCAAAAAGGAAATTGCCAAA |
| | | CGCGACCTTAGCTTATCAGATTTGCAGAATGC |
| | | TTACGAAAGGTGGACTAAGGAAAACGATGTTA |
| | | AAGCTGAAAAGAACGTGCGGAATTATTTTAAG |
| | | CTGACTGAGCTGCGCGTGGACGAGAAAACAAA |
| | | GGAAAAAGATAGCATCGAGATCTTGAAGAATC |
| | | TGGAAGTACTTTACAGTAAGATCGATTTTGAG |
| | | AAGCAGGAGAATCTAATACAGGAGAAGACTTC |
| | | AGCCACTCCTATTAAAGACTATCTGGACGAGA |
| | | TCCAGAACTTATACCACTATCTGAAGTTAGTT |
| | | GACTATAGAGGAGAAGAGCAGAAAGACACAGA |
| | | CTTCTATAGCAAGTACGACGAAATAATCCAAA |
| | | CACTGAGTGAGATTATCCCGCTCTATAATAAG |
| | | GTGAGAAACTTCGTGACAAAGAAGCCCAACGA |
| | | AATCAAAAAGGTTAAGCTGAACTTCGACTGCC |
| | | CAACTCTTGCCAATGGATGGGATCTCAACAAA |
| | | GAGTCATCTAACGACGCCATTATCTTGCGCAA |
| | | GAATGGTAACTACTACCTGGGCATTTTCAATC |
| | | CAAAGGACAAACCAAAGTTTGAGTACAATAAT |
| | | GAAGACTCTGGATATGAGAAGATGATCTACAA |
| | | GCTGCTGCCCGGCCCCAATAAGATGCTGCCAA |
| | | AGGTGTTTTTTAGCGCGAAAGGGCTGGAGACG |
| | | TTTCGGCCCCCCAAGGATCTGGTCCTAGGCTA |
| | | CGAGGAAGGAAAACATAAAAAGGGTGACAATT |
| | | TCGACAAGGTCTTTATGCATAAACTGATAGAC |
| | | TGGTTTAAGTACGCAATAAATCAGCACGAGGA |
| | | CTGGAAAAACTTTAACTTCAAATTCAGCCCTA |
| | | CTGAGTTCTACGAGGATATGTCGGGCTTTTAC |
| | | AAAGAAGTGGAGTTGCAGGGCTACAAAATCAC |
| | | GTTCAACAAGGTGAGTGATAATTGCATCAATT |
| | | CCCTCGTCGACAGTGGAAAACTGTTTCTGTTT |
| | | CAGATCTACAACAAGGATTATTCCACGGGGGA |
| | | AGAAGGCGGCAACGGATCCACTGGCAAGAAGA |
| | | ATCTGCATACCCTTTACTGGGAAAATCTCTTT |
| | | TCCGAAGAAAATTTGCGAGATGTGTGCTTTAA |
| | | ACTGAATGGTGAGGCCGAATTCTTTTGGAGAG |
| | | ACGCTAATCCTAATGTCAAAGCGGTGTGTCAC |
| | | AAAAAAGACTCTGTGCTCGTCAACAGGACCAC |
| | | CTCCGACGGGAAGTCTATTCCAGAGGAAATTT |
| | | ACCAGGAGATCTACAAGTACAAGAACCCAGAG |
| | | AAGCAAGAGAAGGAGTTCACCCTTTCCAAAGA |
| | | TGCTAAAGAGCTCCTGGAGTCTGGGACAGTGG |
| | | TGTGTAAGAAAGCTAAATTCACCATTACGAAA |
| | | GATCGGCATTTTACCCAGCAAACCTATTTATT |
| | | CCATTGCCCTATCACAATGAACTTCAAGGCCC |
| | | CCGAGATCACTGGACGCAAATTTAATGAGCAC |
| | | GTCCAGGAGATCCTCCGCAATAATCCAGAAGT |
| | | AAAGGTGATTGGACTAGACAGAGGCGAAAGAC |
| | | ATCTGATCTATTTGTCGCTCATCAATCAGAAA |
| | | GGGGAAATCGAGCTTCAAAAGACCCTCAATCT |
| | | GGTGGAGCAGGTGCGAAACGATAAGACTGTGA |
| | | GTGTTAACTACCAGGAGAAGCTGGTGCACAAA |
| | | GAAGTGGAGCGAGATAAAGCCCGGAAGTCCTG |
| | | GCAGTCAATCTCGAACATCAAGGAACTTAAAG |
| | | AGGGGTACTTGAGCAATATTGTGCACGAGATC |
| | | GCCAAGTTGATGGTGGAAAACAATGCAATTGT |
| | | TGTAATGGAAGATCTCAACTTCGGTTTTAAGC |
| | | GTGGCCGATTTCCCGTCGAAAGGCAGGTTTAC |
| | | CAAAAATTCGAGAACATGCTAATAGAAAAGCT |
| | | AAACTACCTGGTATTCAAGGACAAAAACGTGA |
| | | CGGAACCGGGTGGCGTTTTAAACGCCTATCAG |
| | | CTCGCTGACAAAGCCGTTAACGTCAGCGACGT |
| | | GGGAAAGCAATGTGGCTGGATTTTTTATATAC |
| | | CTGCCAGCTATACTAGTAAGATCGATCCAAAG |
| | | ACTGGATTCGCAAATCTGTTCTATACCGCGGG |
| | | GCTGACTAATATCGAAAAGAAGAAGGATTTCT |
| | | TCGACAAATTTGACAGTATCAGGTACGACAGA |
| | | AAATTAGATAGCTTTGTTTTCGGATTCGATTA |
| | | CTCTAACTTATCCGACAACGCCGACTACAATA |
| | | AGAAATGGGAGCTCTACAGTCGGGGAGAGCGC |
| | | CTTGTCTATTCCAAAGCTGAGAAAAGCACAAT |
| | | CTCCGTTAACCCGACCGAGAATCTGAAGGTGC |
| | | TGTTCGATAAACAGGGCATTGTGTGGGACTCT |
| | | AAGGACAACTTTATCGATCAGATTCACGCAGT |
| | | TCAGGCTGAGAGAGATAACGTCCCCTTCTATG |
| | | ACGGACTTTATAGGTCCTTCACTGCCATACTG |
| | | CAAATGAGAAACTCTGTCCCTAACTCATCTAA |
| | | ACAGGAAGACGATTACCTCATCTCACCCGTGA |
| | | TGGCCGATGACGGGAATTTTTATGATAGCCGT |
| | | CTGGAGGCCGCAAAGGGCAAAGACGAGAAGGG |
| | | CAACTGGATAAGCAAGCTGCCCGTTGACGCTG |
| | | ACGCCAACGGTGCATACCACATCGCCTTAAAG |
| | | GGCCTCTATTTGCTCAAGAATGATTTCAACCT |
| | | GAACGAAAAAGGGTATATCGAAAACATAAGCA |
| | | ATGCAGATTGGTTCAAATTCGTCCAAAACAAA |
| | | GAGTATCAGGACTGTTGA |

TABLE S10C
Direct Repeat Group 10

| SEQ | | SEQ | |
|---|---|---|---|
| ID | Direct Repeat | ID | Direct Repeat |
| NO | (Variant #1) | NO | (Variant #2) |
| 343 | ATCTACAACAGTAGAAATT | 344 | CTACAACAGTAGAAATTTA |
| | TAGTATGAAGTTCAAAC | | GTATGAAGTTCAAAC |
| 345 | ATCTACAACAGTAGAAATT | 346 | TCTACAACAGTAGAAATTC |
| | CTATATTAGTTTGAAAC | | TATATTAGTTTGAAAC |
| 347 | GTTTCAAACTAATTAAGAA | 348 | TTTCAAACTAATTAAGAAT |
| | TTTCTACTGTTGTAGAT | | TTCTACTGTTGTAGAT |
| 349 | GTTTCAGTCTGATATTGAA | 350 | TTTCAGTCTGATATTGAAT |
| | TTTCTACTGTTGTAGAT | | GTTCTACTTTGTAGAT |
| 351 | GTTTGAACTTCTTATTAAA | 352 | TTTGAACTTCTTATTAAAT |
| | TTTCTACTGTTGTAGAT | | GTTTCTACTTGTAGAT |
| 353 | GTTTAAACGAACTATTAAA | 354 | TTTAAACGAACTATTAAAT |
| | TTTCTACTGTTGTAGAT | | TTCTACTGTTGTAGAT |

TABLE S10D
crRNA Sequences Group 10

| SEQ | | |
|---|---|---|
| ID | | |
| NO | Sequence | FIG |
| 355 | GUUUGAACUUCAUACUAAAUUUCUACUGUUGUAGAU | FIG. 10A |
| 356 | GUUUCAAACUAAUAUAGAAUUUCUACUGUUGUAGAU | FIG. 10B |
| 357 | GUUUCAAACUAAUUAAGAAUUUCUACUGUUGUAGAU | FIG. 10C |
| 358 | GUUUCAGUCUGAUAUUGAAUUUCUACUGUUGUAGAU | FIG. 10D |
| 359 | GUUUGAACUUCUUAUUAAAUUUCUACUGUUGUAGAU | FIG. 10E |
| 360 | GUUUAAACGAACUAUUAAAUUUCUACUGUUGUAGAU | FIG. 10F |

TABLE S10E
Consensus Sequence Group 10

| SEQ | |
|---|---|
| ID | |
| NO | Consensus Sequence |
| 361 | XXXXXXFXXKXMKTIEXFCGQKNGYSRSITLRNXLIPIGK |
| | TEENJKZZQFLEKDQERAXAYPEIKKLIDEIHRGFIEXTL |
| | SKXSFXWEPLFDXFELYQNEKDKSKKAAXKKXLEKLQSGA |
| | RKKIVEAFKKXPDFXKLFKXXLFKELLPALIKNXXXXEIS |
| | DKEXALKVFXRFSTYFTGFHENRKNMYSEEAKSTAISYRI |
| | VNENFPKFYANVKLFXYLKENFPEIISETEESLKXHLNGK |
| | KLDDIFSXEXFNXVLXQSGIDFYNTVIGGIXGEAGTXKXQ |
| | GLNEKINLARQQLPXEEKNKLRGKMVVLFKQILSDRXTXS |
| | FIPVGFENKEEVYSSVKXFNXEIVBKSVXETKELFXQVXX |
| | FBLSEIYVPAKSLTBFSXXIFGXWSILXEGLFLLEKDKMK |
| | KALSEKQEEKJNKEIAKKDCSLDELQXAYERXCXEXNXXV |
| | EKNXKDYFDXVXYRZZSXXXKSEKKKVSILSXITESXSKI |
| | DFENIHDLQQEKEAATPIKTYLDEVQNLYHHLKLVDYRGE |
| | EQKDSNFYSKXDEIITXLSEIIPLYNKVRNFVTKKPGEXK |
| | KXKLNFDCPTLANGWDENKESSNDAIILRKDGKYYLGIXN |
| | PKZNKPKFXKEXXZZZZZISXDCYEKMVYKLLPZZZGPNK |
| | MLPKVZZZZZZZZZFFSAKGQEXFZZZZZZZLPPKDLJZZ |
| | ZZZZZZZZZZZZLGYDEGKHKKZZZZZGDXFDKEFMXKLI |
| | DWFKDAINRHEZZZZDXKKZZZXNFZXFSDTSSYEDMSGF |
| | YKEVELQGYKISFXKVSDEEINSLVDSGKLFLFQIYNKDF |
| | ATZZZZZZKATGKKNLHTLYWENLFSEENLKDVCLKLNGE |
| | AELFWRKASLNKEKVTVHKKGSILVNRTTXDGKSIPEXIY |
| | QEIYQFKNKMKDEZZZZJSDNAKELLDSGZZZZZZZZZZZ |
| | ZZZZZZZZZZKVVCKXATHDITKDXHFTEDTYLFHCPITM |
| | NFKAPXITXXXFNNHVLEVLXNNPDVKXIGLDRGERHLIY |
| | LSLINQKGEIELQKTLNLVEQVRNDKTVSVNYQEKLVHKE |
| | GDRDKARKNWQTIGNIKELKEGYLSNXVHEIAKLMVEXNA |
| | IVVMEDLNFGFKRGRFAVERQXYQKFENMLIEKLNYLVFK |
| | DKKVTEPGGVLNAYQLTBKSANVSDVYKQCGWLFYIPAAY |
| | TSKIDPKTGFANLFITKGLTNVEKKKXFFDKFDSIRYDXK |
| | EDCFVFGFDYSKICDNADFKKKWEVYTXGERLVYXKTERK |
| | NISVNPTEELKSIFDXFGINWNNEXNFIDXIHTIQAEKSN |
| | AKFFDTLLRMFNATLQMRNSVPNXXZZEDDYLISPVKAED |
| | GTFXDSREEAKKGXDZZXZXZXKLPXDADANGAYHIALKG |
| | LYLLENDFNRNEKGVIQNISNADWFKFVQEKEYXDC |

Wherein:
each X is independently selected from any naturally occurring amino acid; and
each Z is independently selected from absent and any naturally occurring amino acid.

TABLE S1OF
Native Nucleotide Sequences Group 10

| SEQ | Corres- | |
|---|---|---|
| ID | ponding | |
| NO | AA | Sequence |
| 362 | 331 | TTGTTGTTTATAATTGAGTTTGAGGAGAAAATTATGAAAACAATTGAAAATT |
| | | TTTGTGGCCAAAAAAATGGTTATTCTCGCTCTATTACCTTGCGAAACAGGTTG |
| | | ATTCCAATCGGAAAAACAGAAGAAAATATTGAAAAACTACAACTTCTTGATA |
| | | ATGACATTAAGCGTTCAAAGGCTTATGTTGAAGTCAAGTCGATGATAGATGA |
| | | TTTTCACCGCGCATTCATAGAAGAAGTTCTTTCTAAGGCAAAACTTGAATGG |
| | | GGGCCATTATATGACCTGTTTGATTTGTTCCAGAATGAAAAAGACAAGCATA |
| | | AGAAAAGTAAAATAAAAAAAGAGTTAGAAACCATTCAAGGTGTGATGCGAA |
| | | AACAGATTGTAAAAAAGTTTAAGGATGATGATAGGTTTGACAAGCTTTTCAA |
| | | GAAAGAAATTTTAACTGAATTTGTTCCAACTGTAATAAAGGCTGATGAATCA |
| | | GGAACTATATCCGACAAGCGGGCAGCTCTTGATGTGTTTAAGGGATTTGCGA |
| | | CATATTTTACAGGTTTTCACCAAAACAGACAAAATATGTATAGCGAAGAGGC |
| | | TAAGGCTACCGCTATCAGCAATAGAATAGTTAATGAAAATTTTCCAAAGTTC |
| | | TATGCAAATGTAAAGGTTTTTGAATGCTTGCAGAAAGAGTATCCTGCAATTA |
| | | TCACTGAAACGGAAGAGGCTCTTTCTGAAATCCTTAATGGCAAAAAACTGGC |
| | | TGATATTTTTAGCGCGGACGGATTTAATTCAGTTTTGAGCCAGAGCGGCATTG |
| | | ATTTTTATAATACGATAATTGGCGGCATTGCAGGAGAGGCAGGAACTCAAAA |
| | | GTTGCAAGGCATAAACGAAAAAATAAATCTTGCCCGCCAGCAGCTTCCTACA |
| | | GAAGAAAAAAACAAGCTCAAGCGGAAGATGAGTGTATTATACAAGCAGATT |
| | | TTAAGCGACAGAAGTACGGCTTCTTTTATTCCGATTGGATTTGAATCAAGCG |
| | | ATGAAGTTTACGAATCTGTAAAACAGTTTAAGGAACAGTCATTAGATAATGT |
| | | CATTTCCGCTGCAAAAGAATTGTTTGAAAAATCTGATTATGATTTGAGTCAG |
| | | ATTTATGTTCCTGCAAAAGAAGTCACCGACTTTTCATTGAAGCTTTTTGGCAA |
| | | TTGGTCGATTTTGCATGACGGGCTTTTCTTAATTGAGAAAGATAATTCAAAGA |
| | | AGACTTTCACGGAAAAGCAGATTGAAAACCTAAGAAAAGAAATCGCAAAAA |
| | | CAGATTGTTCTCTTGCGGATTTGCAGAACGCCTATGAGCGATGGGCAAAAGA |
| | | AAATGATGTTAAAGCTGAAAAGACTGTAAAGAACTATTTCAAAATTGCAGAG |
| | | CTTCGCGCTGATGGAAAATCAAGAGAAAAAACTTCTGTGGAGATTCTGAATA |
| | | AAATTGAATCGACCTTTGAGAAAATTGATTTTGAAAAGCGAGATAATCTTAT |
| | | AAAGGAAAAGGAGACGGCAACTCCGATAAAAGAATTCCTCGACGAAGTTCA |
| | | GAACCTTTATCATTATCTGAAATTGGTTGACTATCGTGGTGAAGAACAGAAG |
| | | GACACCGATTTTTATTCAAAATATGATGAAATACTGCAGACGCTTTCTGAAA |
| | | TTGTTCCGCTTTATAATAAGGTGAGAAATTTTGTCACAAAAAAGCCTAATGA |
| | | GGTGAAGAAAGTAAAGCTGAATTTTGATAATGTTTCATTAGCAAAAGGTTGG |
| | | GATGTAAACAAAGAATCTGATTATACATGTATTTTACTCCGCAGAAGTGGAC |
| | | TGTATTATTTAGGAGTACTAAATCCAAAAGATAAGCCAAAGTTTGACTCTGA |
| | | GAACAATGGTGAAACAAGTATAAATAAGAATGATTGTTACGAAAAGCTTGTT |
| | | TATAAGTATTTTAAGGATGTAACAACCATGATTCCAAAATGTTCGACACAGT |
| | | TAAATGATGTTAAACAGCATTTTAAAAACTCTAATGAAGATTATATTTTGGA |
| | | AAACAATAATTTTATTAAGCCACTTGTAATTTCAAAGAGAATTTTTGATCTGA |
| | | ATAATAAAACTTTTGATGAAAAGAAAATGTTTCAAATTGACTATTATAGGAA |
| | | TACTGGCGATTTAAAAGGTTATACAGAAGCTGTAAAAGATTGGATTTCATTT |
| | | TGTATGACCTTTGTTCATTCCTATAAAAGTACCTGTATATATGATTTTTCTTCC |
| | | TTAGGCGATTGCAGCCAATTTAAGCAGGTTGATCAGTTTTACAAAGAGATTA |
| | | ATCTTTTACTTTATAAAATTTGGTTTGTGAATGTAACTGCTGAAAAAATCAAT |
| | | TCCCTTGTAGATTCCGGTAAACTTTTCCTTTTCCAAATCTACAACAAAGACTA |
| | | TTCAACTGGTAAAGACGGCGGAAACGGTTCAACAGGCAAAAAGAATCTTCA |
| | | TACGATGTATTGGGAAAATTTGTTCAGCGAAGAAAATCTTCGGGATGTCTGC |
| | | CTTAAATTGAATGGAGATGCAGAACTTTTCTGGCGGGATGCAAATCCTGATG |
| | | TGAAAGATGTATGCCATAAAAAAGGTTCAGTTCTTGTAAACAGAACGACCTC |
| | | TGACGGTGAGACAATCCCAGAAGAAATATATCAAGAAATTTACAAGTTCAA |
| | | AAATCCTAATAAACAGGAAAAAAGCTTTAAACTTTCTGATACCGCAAAAGAA |
| | | CTTCTGGATAGTGGAAAAGTCGGTTTCAAAGAGGCCAAATTTGACATTATCA |
| | | AAGACCGTCATTTTACACAGAAAACATATCTGTTCCATTGTCCGATTACCATG |
| | | AATTTTAAGGCTCCTGAAATTACAGGAAGAAAATTCAATGAAAAAGTCCAGC |
| | | AGGTGTTGAAAAATAATCCTGATGTAAAGGTTATTGGTCTTGACCGTGGCGA |
| | | GCGTCATTTGATTTATCTTTCGCTTATCAATCAAAAGGGCGAAATCGAGCTTC |
| | | AGAAAACGCTCAACCTTGTGGAACAGGTTCGCAATGATAAAACTGTTTCTGT |
| | | AAATTATCAGGAGAAACTAGTCCAGAAGGAGGGAGAGCGTGGCAAGGCTCG |
| | | CAAGAACTGGCAAACAATCAGCAATATCAAAGAATTAAAAGAAGGATATCT |
| | | TTCAAACATTGTTCACGAGATTGCAAAATTAATGGTAGAAAATAATGCAATT |
| | | GTCGTAATGGAAGATTTGAATTTTGGATTTAAACGAGGACGATTTGCGGTTG |
| | | AGCGTCAAGTTTACCAGAAGTTTGAAAACATGCTCATTGAAAAGCTTAATTA |
| | | TCTTGTGTTCAAGGATAAGAAAGTCGCTGAGCCTGGTGGCGTTTTGAATGCA |
| | | TATCAGCTAACTGACAAAGTTGCAAATGTAAGCGATGTTGGCAAACAGTGCG |
| | | GATGGATTTTCTATATTCCGGCTGCGTATACTTCAAAAATTGATCCAAAGACT |
| | | GGTTTTGCAAATCTTTTTTATACTGCAGGGCTTACAAATATCGAAAAGAAAA |
| | | AAGATTTCTTTGATAAGTTTGATTCTATTCGCTATGACAGAAAAACAGATTCG |
| | | TTTGTGTTCACTTTTGATTACAGCGACTTTGGAGATAATGCGGACTTTAAGAA |
| | | AAAATGGGAACTCTATTCTAGGGGAGAGCGACTTGTTTTCAGCAAGGCAGAG |
| | | AAATCTGTTGTTCATGTAAATCCAACAGAAAACTTAAAGGCATTGTTCGACA |
| | | AGCAAGGGATAAACTGGAGTTCAGAAGATAATATTATAGACCAGATACAGG |
| | | CAGTGCAGGCTGAAAGAGAAAATTGCGCTTTTTATGACGGCCTATACCGTTC |
| | | GTTTACTGCAATTCTCCAGATGCGAAATTCCGTTCCTAATTCTTCAAAAGGGG |
| | | AAGATGATTATCTGATTTCACCAGTCATGGCAGAAGATGGAAGTTTCTATGA |
| | | CAGCCGAGAGGAAGCTGAAAAAGGAAAAACGACTGACGGAAAATGGATTTC |
| | | AAAGCTTCCTGTTGATGCTGATGCCAACGGCGCGTACCATATTGCGCTAAAG |
| | | GGACTTTATCTTTTGCAGAATAATTTCAATTTAAATGAAAATGGCTATATTGA |
| | | AAACATTTCAAACGCCGACTGGTTTAAGTTTGTTCAGGAGAAGGAATATGCA |
| | | AAATAA |
| 364 | 333 | ATGAAAACTATTGATTCTTTTTGTGGACAAAACGAGGGTTATTCACGTTCAAT |
| | | AACATTACGAAATAAATTGATTCCAATTGGAGAAACTGAAAAAAATATTAAA |
| | | GAGTTTTTAGAAAAAGATGTTGAACGATCAGAAGCTTATCCTCAAATAAAGA |
| | | AATTAATAGATGATATACATAGAGGATTTATAGAAGAGTGTCTTTCTAATGT |
| | | TTCTTTTCCATGGGAACCATTATTTGATCAGTTTGAGTTATATCAAAATGAAA |
| | | AAGAAAAGATAAAAAAGAATGCGAAGAAAAAAGAACTTATTGTTCTTCAAG |
| | | TGGCAGCACGAAAACGAATTGTAAAAGCATTTAAAGATAATAAGGATTTTGA |
| | | AAAGCTTTTTAAGGAAGAATTATTTAAGGAATTATTGCCTCAATTAATAAAA |
| | | TCTGCTCCTGTTACAGAAATTGCAGATAAAGAAAAAGCACTTTCTGTTTTTAC |
| | | AAGATTCAGTACATATTTTAATGGTTTTCATGAAAATAGGAAAAATATGTAT |
| | | AGTGAAGAGGAAATATCAACAGGAATTGCATATAGAATAGTAAACGAAAAT |
| | | TTTCCAAAGTTTTTTTCGAACATAAAACTTTTTGAATATTTAAAAGACAACTT |
| | | TCCAGAAATTATAAAAGAAACAGAGATTTCATTAAAAGACACATTAAAAGG |
| | | CAAAAAGCTTTGTGATATTTTTAAAGTTGAAGCTTTTAATAATGTTTTATCTC |
| | | AGAGTGGAATAGATTTTTATAATACGATAATTAGTGGTGTTGCTGGTGAAGG |
| | | TGGCACACAGAAAATTAAGGGAATGAATGAAATAATCAATCTTGCAAAACA |
| | | ACAACTTCCAAAGGAAGAAAAAGATAAGTTACATGGCAAGATGGTTGTATT |
| | | ATTCAAACAGATTTTGAGTGATAGAGAGACTGCATCATTTATACCGACTGGA |
| | | TTTGAAAAAAATGAAGAAGTATATGCTTCTATAAAAGAGTTTAACAATATTA |
| | | TTGTAAAAGATTCTGTTACAGAAACAAGGAATTTGTTTGCTCTAAATAGTGA |
| | | TATTAAGCTCAATGAAATAATTGTGCCAGCAAAATCTATTACAGCATTTTCTC |
| | | TAACAATATTTGGAAATTGGGTAATTATTTCTGAAGGTTTGTACCTATTGGAA |
| | | AAAGATAAAATAACTAAAGCTTTATCAGAAAAGCAAGAGGAACAGCTTCAT |
| | | AAAGACATTGATAAAAAGGACTGTAATCTTGAAGAAATTCAAAGTGCATAC |
| | | GAACGATGGTGTAGCGAGAATGGGGAAATTGTTCGTACATCTGTAAGAAAAT |
| | | ATTTTAATCTTATTGAGACACAATCAAGTTCATCTGAAAACACATCAACCAA |
| | | GAAAGAAGTGTGCATTCTTGACGAAATAACAAAGTCTTTTTCTCAAATAGAT |
| | | TTTGAAAATGAAAAAGATTTACAGCAGGAAAAAGAAGCGGCAACTCCAATA |
| | | AAAATATATTTAGATGAAGTACAGAATCTTTATCATCATCTTAAGCTTGTTGA |
| | | TTATCGTGGAGAAGAACAAAAAGATTCCAATTTCTATTCTAAATTTGATGAA |
| | | ATAATAGAAAAGCTTTCAGAAATTATTTCTATATATAATAAGGTTCGCAATTT |
| | | TGTCACAAAGAAACCAGGAGAAGTAAAAAAGGTAAAGCTTAATTTTGATTGT |
| | | CCAACTCTTGCTAATGGCTGGGATGAAAATAAAGAGAAGGATAATGATGCG |
| | | ATTCTTCTTTTAAAAGATGGAAACTATTATTTAGGAATTTATAATCCAAAAAA |
| | | TAAACCAAAATTTGATTTTGAAGAAAGCAAAGCTTCTGATTGTTATAAAAAA |
| | | GTTGTATATAAACTTTTACCAGGACCGAATAAAATGCTTCCAAAAGTATTTTT |
| | | CTCAGCGAAAGGACAGAAAGAGTTTCTTCCACCAAAAGAATTGCTTTTAGGA |
| | | TACGAAGAAGGTAAGCATAAGAAAGGAGAGAATTTTGATAAGGAATTCATG |
| | | TATAAACTGATTGATTGGTTTAAGGATGCAATTAACAGACATGAAGACTGGA |
| | | AAAAATTTGATTTTAAATTTTCAGATACAAGAAGTTATGAAGATATGAGCGC |
| | | ATTTTATAAAGAAGTCGAATTACAGGGATATAAGATTTCTTTTAAAAAGGTA |
| | | TCTACAGAAATCATAAATGAATTTGTAAATAGCAGTAAACTTTTTCTTTTTCA |
| | | AATTTATAATAAAGATTTTGCAGTAAAAGCCACTGGAAAAAAGAATCTTCAT |
| | | ACTCTTTATTGGGAAAATTTATTTAGTGAAGAAAACCTTAAAGATATTTGCTT |
| | | CAAACTTAATGGAGAAGCAGAACTTTTCTGGCGAAAGGCAAGTTTAATCAAA |
| | | GAAAAAGTTACGGTTCATAAAAAGAATTCAATTCTTATAAATCGAACAAAAA |
| | | AAGATGGCTCAACAATTCCAGAAAATCTTTATCAGGAAATCTATCAATATAA |
| | | GAATAATATGATTAGTGATATTTCTGAGAATGCGAAAGATTTACTAAATTCT |
| | | GGAAAAGTAATTTGTAAAAAAGCAACACACGATATTACAAAAGATAAACAT |
| | | TTTACAGAAGATGCATATCTTTTTCATTGTCCAATTACAATGAATTTTAAAGC |
| | | TCCTGAGATTACAGGTAGAAAGTTTAATGATAAAGTGCTTGAAGCACTTAAA |
| | | GAAAATCCTGAAATAAAGATTATTGGATTGGATCGTGGTGAAAGGCATTTGA |
| | | TTTATTTATCTCTAATTAATCAAAAAGGAGAAATTGAATTACAAAAAACTCT |
| | | GAATCTTGTAGACCAAATTAGAAATGATAAAACTGTACAAATTAATTATCAA |
| | | GAAAAATTAGTTCAAAATGAGGGAGATCGAGATAAAGCTAGAAAGAATTGG |
| | | CAGACTATAGGAAATATAAAAGAACTTAAAGAAGGCTATCTTTCAGCTATAA |
| | | TACATGAAATTGCTACATTGATGATAGAAAACAATGCCATTGTTGTTATGGA |
| | | AGATTTGAACTTTGGTTTTAAGCATGGAAGATTTGCTGTTGAACGACAAGTA |
| | | TATCAAAAGTTTGAAAATATGCTTATTGAAAAATTGAACTATCTTGTATTTAA |
| | | AGATCGTTCTATAAAAGAACCGGGTGGAGTTCTTAATGCATATCAGCTCACA |
| | | GATAAAGCTGCTAATGTTTCTGATGTTTATAAACAATGTGGTTGGCTTTTCTA |
| | | TATTCCTGCAGGATATACTTCAAAAATAGATCCAAAAACAGGTTTTGCTAAT |
| | | CTATTTGTAACTAAAGGATTAACAAATGTAGAAAAGAAGAAGGATTTCTTTT |
| | | CAAAGTTTGATTCAATTTATTATGATGAAAAAGAAGCTTGTTTTGTTTTTGCT |
| | | TTTGATTATAGCAAATTTGGTGACAATGCAGACTTTAAGAAAAAATGGGAAG |
| | | TTTATACGAAAGGTGAAAGACTTGTTTATAGTAAACAAGAAAGAAAGTCTAT |
| | | TACTGTAAGTCCAACTGAAGAACTTAAAAAAATATTTAATGAGTTTAGTATA |
| | | AACTGGAATAATAGTGAAAGTGTTCTTGACCAAATAAAAACTATTCCTGCTG |
| | | AAAAATTGAATGCTAAGTTTTTTGATACATTATTACGTGCATTTAATGCTACT |
| | | TTGCAAATGCGTAATTCTGTACCAAATTCTTCACGACAGGAAGATGATTATTT |
| | | AATATCTCCTGTAAAAGCAAGAGATGGAACTTTCTACGATAGTCGCATTGAA |
| | | GCTGAAAAGGGAATAGATAAAAATGGCAGGTGGGTTTCTAAATTACCAGTTG |
| | | ATGCCGATGCAAATGGAGCTTATCATATTGCACTTAAAGGATTATATCTTTTG |
| | | GAAAACAATTTTAATCGAAACGAAAAAGGAGTTATCCAAAATATTTCTAATG |
| | | TAGAATGGTTCAAGTTTGCACAGACAAAATAA |
| 365 | 334 | ATGGCTAGAATAATTGATGAGTTTTGTGGACAGATGAATGGGTATTCTCGTT |
| | | CAATTACTTTGAGGAATAGGTTAGTTCCTATTGGGAAAACTGAAGAAAATTT |
| | | AAAGCAGTTTTTAGAAAAAGATTTGGAAAGAGCAACTGCTTATCCGGACATA |
| | | AAAAATCTTATAGATGCTATTCATCGTAATGTAATTGAGGATACTTTATCCAA |
| | | AGTTGCTTTGAATTGGAATGAAATATTCAATATACTTGCTACTTACCAAAATG |
| | | AAAAAGATAAAAAAAAGAAAGCAGCAATAAAAAAGGATTTAGAGAAATTA |
| | | CAAAGTGGTGCAAGAAAAAAAATAGTTGAGGCTTTTAAAAAGAATCCTGATT |
| | | TTGAAAAATTGTTTAAGGAAGGATTGTTCAAAGAACTTTTACCCGAATTAAT |
| | | CAAATCTGCTCCCGTTGACGAAATAGCAGTCAAAACAAAAGCTTTGGAGTGT |
| | | TTTAATAGATTTAGTACATATTTTACAGGCTTTCATGACAACAGAAAAAATAT |
| | | GTATAGTGAAGAGGCAAAGTCTACGGCAATAAGTTATCGTATCGTAAATGAA |
| | | AATTTCCCAAAATTTTTTGCAAATATAAAACTGTTCAATTATTTAAAAGAGCA |
| | | TTTTCCAAGAATAATTATTGATACAGAGGAATCTTTAAAAGATTACCTCAAA |
| | | GGTAAAAAACTTGACTCTGTGTTCAGTATTGATGGTTTTAACAGTGTACTGGC |
| | | TCAAAGTGGAATTGATTTTTATAACACAGTAATTGGTGGAATTTCTGGTGAA |
| | | GCAGGAACAAAAAAAACTCAGGGATTGAATGAAAAAATCAATCTTGCAAGA |
| | | CAACAATTGTCGAAAGAAGAAAAAAATAAACTTCGTGGTAAAATGGTTGTCT |
| | | TGTTTAAACAGATTTTAAGTGATAGAGAAACCTCTTCTTTTATTCCAGTTGGT |
| | | TTTGCAAATAAAGAGGAGGTTTATTCAACTGTTAAGGAATTTAATAACTCAA |
| | | TTGCTGAAAAGGCTGTTTCAAAAGTAAGAGACTTATTCTTACACAGAGAAGA |
| | | ATTTACTCTTAATGAAATCTTCGTTCCTGCAAAGTCATTGACAGATTTTTCTC |
| | | AAGCGATTTTTGGGTCTTGGTCAATACTTTCTGAAGGTCTGTTCTTGCTGGAA |
| | | AAAGATAGCATGAAAAAGGCTTTATCTGAGAGTCAAGAAGAAAAAATCAAT |
| | | AAGGAAATTGCGAAAAAAGATTGTTCTTTTACAGAATTGCAGTTGGCTTATG |
| | | AAAGATATTGTACTGAACATAATCTACCTGTAGAGAAATTTTGCAAGGATTA |
| | | TTTTGACATTGTAGATTATCGTGGAAATGGTGCAAAATCAGAAAAGACAAAA |
| | | GTTTCTATTCTTTCTGAAATTTTGGAGACATTTTTGCAACTTGATTTTGACCAT |
| | | ATTCAGGATTTACAACAAGAAAAAAATGCGGCAATTCCTATAAAAGCCTATT |
| | | TAGATGAAGTACAGAATCTATATCACCATTTGAAATTGGTAGATTATCGTGG |
| | | TGAGGAACAAAAGGATTCAACTTTTTATTCTAAACATGATGAGATTTTGACT |
| | | GATCTTTCGCAAATCGTTCCCCTTTATAATAAAGTTAGAAACTTTGTTACCAA |
| | | GAAACTTGGAGAAAGTAAAAAGATAAAACTTAATTTTGATTGTCCAACTTTA |
| | | GCAAATGGCTGGGATGAAAACCAAGAGTCTTCTAATGATGCCATTATCTTGA |
| | | GAAAAGATGGGAAATATTATCTTGGAATTTATAATCCAAATAACAAGCCAAA |
| | | ATTTGCTAAGAAAGATAGCATTGTTGGTGATTGTTATGAAAAAATGGCTTAT |
| | | AAACAAATAGCACTTCCAATGGGATTAGGTGCATTCGTAAGGAAATGTTTTG |
| | | GTACCGCTCAAAAGTATGGCTGGGGTTGTCCAGAAAATTGCTTAAATTCTGA |
| | | AGGAAAAATTATAATCAAAGATGAGGAAGCAAAAGGAAATTTAGAGGCAAT |
| | | TATCGATTGTTATAAAGACTTCTTAAATAAATATGAAAAAGATGGTTTTAAA |
| | | TACAAAGATTACAATTTCAGCTTTTTAGATTCTGCTTCTTATGAAAAATTATC |
| | | TGACTTTTTTAACGATGTAAAACCTCAAGGTTATAAACTCTCCTTCACAAGTA |
| | | TTCCATTATCAGAAATTGATAAAATGATAGATGAAGGCAAGCTCTTCCTTTTC |
| | | CAGATTTACAACAAGGACTTTGCGAAGAAAGCGACAGGGAAGAAAAATCTT |
| | | CATACCTTGTACTGGGAGAATCTTTTTAGTGTTGAGAACTTGCAGGATGTGGT |
| | | CTTGAAATTGAATGGCGAGGCGGAACTCTTTTGGAGGGAGGCAAGCATCAA |
| | | AAAGGATAAGGTCATTGTCCACAAGAAAGGTTCTATTCTGGTGAATAGGACG |
| | | ACTACAGACGGAAAATCTATTCCAGAGGCCATCTATCAGGAAATTTATCAAC |
| | | TTAAGAACAAGATGGCTGACTCCATTTCTGATGAAGCCAAAAGGTTGTTGGA |
| | | GTCAGGAACTGTCGTTTGTAAGGTTGCCACCCATGATATCGTGAAGGACAAG |
| | | CACTTCACAGAGAATACCTATCTGTTCCACTGTCCTATTACCATGAATTTCAA |
| | | GGCGAAGGATAGAACAAATAAGGAATTTAATAATCATGTCTTGGAGGTTCTC |
| | | AATAAGAATCCAGACATAAAAGTCATTGGCTTGGATCGTGGAGAGCGTCATT |
| | | TGCTCTATCTTTCTTTGATCAACCAAAAAGGTGAGATTGAATGCCAGAAAAC |
| | | ACTGAATTTGGTGGAGCAAGTGAGGAATGACAAGACTGTCTCTGTAAACTAC |
| | | CATGAAAAGCTGGTCCACAAAGAGGGTAGTCGTGATGCAGCACGAAAGAAT |
| | | TGGCAAACGATTGGGAATATAAAGGAATTGAAGGAGGGGTATCTTTCCGCTG |
| | | TAGTCCATGAGATTGCCAGCTTGATGGTGAAGCATAATGCAATCGTTGTTAT |
| | | GGAGGATTTAAACTTCGGGTTCAAGCGGGGACGTTTTGCAGTTGAGCGTCAG |
| | | ATTTATCAGAAGTTTGAGAATATGCTGATAGAAAAGCTGAATTATCTTGTTTT |
| | | CAAAGATAGGAAGGTCACTGAGCCGGGCGGAGTATTGAATGCCTATCAATTG |
| | | GCGAATAAGTCTGCAAAGGTGACGGACGTTTACAAGCAATGTGGATGGCTTT |
| | | TCTACATCCCCGCAGCCTACACCTCCAAGATTGACCCTCGGACTGGATTTGCC |
| | | AATCTTTTTATCACAAAGGGGCTGACAAATGTGGAAAAGAAGAAGGAATTCT |
| | | TTGGAAAGTTTGATTCAATCAGATATGATGCCACGGAGTCATGCTTTGTCTTT |
| | | AGCTTTGATTACGCAAAAATCTGTGACAATGCAGACTACAAGAAAAAATGG |
| | | GATGTGTACACGAGGGGAACCCGGCTTGTGTACAATAAAACTGAACGGAAG |
| | | AATGTTTCTGTCAATCCCACAGAAGAGTTGCAGTGTGTATTTGATGAATTTGG |
| | | AATCAAGTGGAATACTGGAGAGGACTTGATTGAATCCATCAGTTTGATTCCG |
| | | GCAGAAAAGTCGAATGCAAAATTCTTTGACGTTCTGTTGAGGATGTTCAATG |
| | | CCACACTGCAAATGAGGAATTCTGTGCCGAATACGGACACTGACTACTTGGT |
| | | TTCTCCTGTGAAAGCGGAGGACGGTTCTTTCTTTGATTCTCGTGAGGAGTTTA |
| | | AGAAAGGTGGAGATGCAAGGCTTCCCATTGACTGTGATGCCAATGGAGCGTA |
| | | TCACATTGCGTTGAAGGGTCTGTATTTGCTGTTGAATGACTTCAATCGGGATA |
| | | ACAAGGGAGTGATTCAGAATATCTCCAACAAGGATTGGTTCAAGTTTGTACA |
| | | GGAGAAAGTATACAAGGACTGA |
| 366 | 335 | ATGGCAACGATTGAGAATTTTTGTGGACAAGAGAATGGGTATTCTCGGTCAA |
| | | TTACTTTAAGAAATAAGTTGATTCCTATTGGAAAAACAGCGAACAACTTAAA |
| | | ACAATTTTTGGAAAAGGATCAAGAAAGAGCTGATGTTTATCCTGAAATTAAA |
| | | AAGTTAATTGATGAAATACATAGAGGCTTTATTGAAGATACTCTTTCTAAGTT |
| | | TTCATTTGTATGGGAACCTTTATTTGATGATTTTGAATTATATCAAAATGAAA |
| | | AGGATAAATCTAAAAAAGCCACAAAGAAAAAAGATTTAGAGAAATTTCAAA |
| | | GTGGAGCAAGAAAAAAAATTGTGGAAGCGTTTAAGAAGCATCCAGACTATG |
| | | ACAAACTTTTTAAAGATGGATTATTTAAGGAATTATTACCAGCTTTGATAAA |
| | | AAATTCTTCTGATTCTGAAATATCAAATAAAGAAGAAGCATTAAAAGTTTTT |
| | | GATAGATTTAGTACATATTTTGTTGGTTTTCACGAAAATAGAAAAAATATGT |
| | | ATAGCGAAGAAGACAAATCTACTGCAATAAGCTATAGAATAGTTAATGAAA |
| | | ACTTTCCAAAATTCTATGCCAATGTAAAATTGTACAATTATATAAAAGAAAA |
| | | TTTCCCAAAAATTATTTCTGAGACAGAGGAATCTTTAAAGAATCATTTGAAC |
| | | GGAAAAAGACTTGATGAGATTTTTAATGCAGAATCTTTTAATGATGTATTAG |
| | | CACAAAGTGGAATTGACTTCTATAACACTGTTATTGGTGGTATTTCTACAGAA |
| | | ACAGAAAAAGTTCAAGGTTTGAATGAAAAAATAAATCTTGCAAGACAAAAA |
| | | CTTCCCGCAGAAGAAAAAAATAAACTACGGGGTAAAATGGTAGTTTTGTTTA |
| | | AGCAGATTTTAAGTGATAGAGGAACATCATCTTTTATTCCTGTTGGTTTTAAC |
| | | AACAAGGAAGAAGTCTATTCTTCTGTAAAATCATTCAATGATGAATTTGTAA |
| | | ATATTTCTGTTTGTGAAACAAAAGAATTATTCAAACAAGTTGCAGAGTTTAA |
| | | TCTTAGTGAAATTTATGTTCCAGCAAAATCTTTAACAAACTTTTCGCAAAATA |
| | | TTTTTGGTTCTTGGTCAATTCTAACAGAAGGACTTTTCTTATTAGAAAAAGAT |
| | | AAAGTGAAAAAAGCATTATCAGAAAATAAAGAAGAAAAAATCAACAAAGA |
| | | GATTGCAAAAAAAGATTATTCTTTGGATGAGTTACAAGTTGCTTATGAAAGA |
| | | TATTGTAATGAACATAATTTTTCAGTAGAGAAAAATTGCAAAGATTATTTTG |
| | | ATGTTGTTGATTATCGATCAGAAAATGAAAAATCTGATAAGAAAAAAATTTC |
| | | TATACTTTCAGCTATTACAGAATCTTATTCAAAAATAGATTTTGAAAATATTC |
| | | ATGATTTACAACAAGAAAAAGAAGCCGCTACACCAATTAAAACATATTTGGA |
| | | TGAAGTTCAGAATTTATATCATCATCTAAAACTTGTTGATTATCGTGGGGAAG |
| | | AACAAAAAGATTCAAACTTTTATTCAAAATTGGATGAAATCATTACTCAGCT |
| | | TTCAGAAATTATTCCTTTATACAATAAAGTTAGAAACTTTGTTACAAAGAAA |
| | | CCTGGTGAAATGAAGAAGATAAAATTGAATTTTGATTGTCCTACTCTAGCTA |
| | | ATGGATGGGATGAAAATAAAGAATCTTCAAATGATGCAATAATTTTAAGAAA |
| | | GGATGGTAAATATTATTTAGGAATTTTTAATCCAAATAATAAACCAAAATTTT |
| | | CTAAAATCGAAAACATTTCTGAATCATACTACGAAAAAATGGTGTATAAACT |
| | | TTTACCAGGCCCAAACAAGATGTTACCAAAAGTCTTTTTTTCAACAAAAGGA |
| | | CAAGAAACATTTTTGCCACCAAAAGATTTGCTCTTAGGATATGATGCAGGTA |
| | | AACATAAAAAAGGTGATGCTTTTGATAAAGAATTTATGTATAAATTAATTGA |
| | | TTGGTTTAAAGATGCAATTAATCGTCATGAAGATTGGAAAAAATTTAATTTT |
| | | GTATTCTCTCCTACAAAATCTTACGAAGATATGAGTGGTTTTTATAGGGAAGT |
| | | TGAATTACAAGGGTATAAAGTTTCTTTTCAAAAAATATCTGACACAGAAATA |
| | | AATTCTTTTGTAAGCAACGGAAAACTTTTCCTTTTCCAAATATACAATAAAGA |
| | | CTTTGCTTTAAAAGCTTCTGGAAAGAAAAATCTTCATACACTTTATTGGGAAA |
| | | ATCTTTTTAGTGAAGAAAACTTAAAAGATGTTTGTCTAAAATTAAATGGAGA |
| | | AGCAGAATTATTCTGGAGAAAACCAAGTTTGAACAAAGAAAAAGTTACTGTT |
| | | CACGAAAAAGGTTCAATTCTTGTAAATAGGACAACAAATGACGGAAAGTCA |
| | | ATTCCAGAAGACATTTATCAAGAAATTTATCAATTCAAAAATAAAATGAAAG |
| | | ATAAAATTTCTGACAATATTTCTATACAGAATGATGATGGTAAAGTCATTAC |
| | | GATTACAGTAACTTTGGAAAATAAGCAAAAAGAAAAATTCACAGAAAATTA |
| | | TAAAGTTGTATATAAAACTGCAACTCACTATATTACAAAGGATAATCGTTTT |
| | | ACAGAAGACACTTATCTTTTCCATTGTCCTATTACAATGAACTTTAAGGCACC |
| | | TGATAAATCAAATAAAGAATTTAATAATCATGTTCTTGAAGTATTGAGTGGT |
| | | AATCCTAATGTAAAAATTATTGGATTGGATCGAGGCGAAAGACACCTTATTT |
| | | ATCTTTCATTGATAAATCAAAAAGGTGAAATTGAACTTCAAAAAACATTAAA |
| | | TCTTGTTGAACAAGTTAGAAATGATAAAACTGTAAAAGTAAATTATCAAGAA |
| | | AAACTTGTACACAAAGAAGATGATAGAGATAAGGCTCGTAAAAGCTGGCAA |
| | | ACAATTGGAAATATCAAAGAATTAAAAGAAGGCTATCTTTCAAATGTTGTTC |
| | | ATGAAATTGCAAAAATGATGGTTGAACATAACGCAATTGTTGTTATGGAAGA |
| | | TTTGAATTTTGGATTTAAGCGGGGGCGTTTTGCTGTAGAAAGACAGATTTATC |
| | | AAAAATTTGAAAATATGTTAATTGAAAAACTAAATTATCTTGTTTTCAAAGA |
| | | TAAAAAGGTAACAGAGCCTGGTGGTGTTCTTAATGCTTATCAATTAACAAAT |
| | | AAATCTGCAAATGTATCTGATGTCTACAGACAATGTGGATGGCTTTTCTATAT |
| | | TCCTGCTGCTTATACTTCAAAGATTGATCCAAAAACTGGTTTTGCAAATCTTT |
| | | TTATTACAAAAGGCTTAACAAACGTAGAAAAGAAAAAAGAATTTTTTGATAA |
| | | GTTAGATTCTATTCGTTATGACTCAAAAGAAGATTGTTTTGTTTTTGGATTTG |
| | | ATTATGGAAAAATCTGTGATAATGCTGATTTTAAGAAAAAGTGGGAAGTTTA |
| | | TACAAAAGGGGAACGACTTGTTTACAATAAAACTGAACGCAAGAATATTAA |
| | | CATAAATCCAACAGAAGAATTGAAGTCAATCTTTGATGACTTTGGAATAAAT |
| | | TGGAATAATGAAGAAAATTTTATTGATTCTGTCCATACAATCCAAGCTGAAA |
| | | AATCAAATGCAAAATTCTTTGATACACTTTTAAGAATGTTTAATGCAACTTTG |
| | | CAAATGAGAAATTCTATTCCAAACACGGAAATTGACTACTTAATTTCTCCTGT |
| | | AAAATCAGAAGATGGAACTTTCTTTGATTCTAGAGAAGAATTGAAAAAAGGT |
| | | GAAAACGCAAAATTACCAATTGATGCAGATGCAAACGGAGCTTATCACATTG |
| | | CATTAAAAGGTTTGTATTTGTTGGAAAATGACTTTAACCGTAATGATAAAGG |
| | | TGTAATTCAAAACATCTCCAACGCCGATTGGTTTAAGTTTGTTCAGGAGAAA |
| | | GAATATAGGGATTAA |
| 367 | 336 | ATGACAACTATTAACAAATTTTGCGGACAGGGGAATGGGTATTCTCGAGCAA |
| | | TTACTTTAAGAAATAAGTTGATTCCTATTGAAAAAACAGCGGACAACTTAAA |
| | | ACAATTTTTGGAAAAGGATCAAGAAAGAGCTGATTCTTATCCTGAAATTAAA |
| | | AAGTTGATTGATGAAGTGCATCGGGGATTTATCGAGGATACTCTTACAAAAT |
| | | TCTCATTTGTATGGGAACCTTTATTTGATGATTTTGAATTATATCAAAATGAA |
| | | AAGGATAAATCTAAAAAAGCTGCGAAGAAAAAAGATTTAGAGAAATTTCAA |
| | | AGTGGAGCAAGAAAAAAAATTGTTGAAGCTTTTAAGAAGCATCCTGATTATG |
| | | ACAAACTTTTCAAAGATGGATTGTTTAAGGAATTATTACCAGCTTTGATAAA |
| | | AAATTCTTCTGACTCTGAAATATCAAATAAAGAAGAAGCATTAAAAGTTTTT |
| | | GATAGATTTAGTACATATTTTGTTGGGTTTCACGAAAATAGAAAAAATATGT |
| | | ATAGCGAAGAAGAAAAATTTACTGCAATAAGCTATAGAATAGTTAATGAAA |
| | | ACTTTCCAAAATTCTATGCCAATGTAAAATTGTACAATTATTTAAAAGAAAA |
| | | TTTCCCACAAATTATTTCTGAGACAGAGGAATCTTTAAAGAATCATTTGAATG |
| | | AAAAAAAACTTGATGAGATTTTTAATGTAGAATCTTTTAATGATGTATTAGC |
| | | ACAAAGTGGAATTGACTTCTATAACACTGTTATTGGTGGAATTTCTACAGAA |
| | | ACAGAAAAAGTTCAAGGTTTGAATGAAAAAATAAATCTTGCAAGACAAAAA |
| | | CTTCCCGCAGAAGAAAAAAATAAACTACGGGGGAAAATGGTAGTTTTGTTTA |
| | | AGCAGATTTTAAGTGATAGAGGAACATCATCTTTTATTCTTGTTGATTTTAAC |
| | | AACAAGGAAGAAGTTTATTCTTCTGTAAAATCATTCAATGATGAATTTGTAA |
| | | ATCTTTCTGTCTGTGAAACAAAAGAATTATTCAAACAAGTTGCAGAGTTTAA |
| | | TCTTAGTGAAATTTATGTTCCGGCAAAATCTTTAACAAACTTTTCGCAAAACA |
| | | TTTTTGGTTCTTGGTCAATTTTAACAGAAGGACTTTTCTTATTAGAAAAAGAT |
| | | AAAATGAAAAAAGCATTATCAGAAAATCAAGAAGAAAAAATAAATAAAGA |
| | | GATTGCAAAAAAAGATTATTCTTTGGATGAGTTACAGGTTGCTTATGAAAGA |
| | | TATTGTAATGAACATAATTTTTCAGTAGAGAAAAATTGCAAAGATTATTTTG |
| | | ATGTTGTTGATTATCGATCAGAAAATGAAAAATCTGATAAGAAAAAAGTTTC |
| | | TATACTTTCAGCTATTACAGAATCTTATTCAAAAATCGATTTTGAAAATATTC |
| | | ACGATTTACAACAAGAAAAAGAAGCCGCTACACCAATTAAAACATATTTGG |
| | | ATGAAGTTCAGAATTTATATCATCATCTAAAACTTGTTGATTATCGTGGTGAA |
| | | GAACAAAAAGATTCAAACTTCTATTCAAAGTTGGATGAAATCATTACTCAGC |
| | | TTTCAGAGATTATTCCTTTATACAATAAAGTTAGAAACTTTGTTACAAAGAAA |
| | | CCTGGTGAAATGAAGAAGATAAAAATGATGTTTGATTGTAGTTCTTTATTAG |
| | | GAGGATGGGGAACTGATTATGGAACAAAAGAAGCTCATATTTTTATTGATTC |
| | | TGGAAAATATTATTTGGGAATTATAAACGAAAAATTATCAAAAGATGATGTA |
| | | GAGTTATTAAAAAAATCAAGTGAAAGAATGGTAACAAAAGTTATTTATGATT |
| | | TTCAGAAACCTGATAATAAAAATACACCTCGGTTATTTATTCGTTCAAAAGG |
| | | AACAAATTATGCCCCTGCTGTTTCTCAATATAATTTGCCAATAGAATCTATTA |
| | | TTGATATTTATGATAGAGGATTGTTTAAAACCGAATATAGAAAAATCAATCC |
| | | AGAAGTTTACAAAGAATCATTAATAAAAATGATTGACTATTTCAAGTTAGGA |
| | | TTTGAAAGACATGAATCATATAAGCATTATCCATTCTGTTGGAAGGAATCTTC |
| | | AAAATATAATGATATTGGAGAATTTTATAAGGATGTAATAAATTCATGCTAT |
| | | CAATTACATTTTGAAAAAGTGAATTATGATAATTTATTAAAATTGGTTGAAA |
| | | ATAATAAAATATTTCTTTTCCAAATCTATAACAAAGATTTTGCAGAAAAAAA |
| | | ATCTGGAAAGAAAAATCTTCATACACTTTATTGGGAAAATCTTTTTAGTGAA |
| | | GAAAACTTAAAAGATGTTTGTCTAAAATTAAATGGAGAAGCAGAACTATTCT |
| | | GGCGAAAACCAAGTTTAAACAAAGAAAAAGTTACTGTTCACAAAAAAGGTT |
| | | CAATCCTTGTAAATAGAACAACAAATGATGGAAAATCAATTCCAGAAGATAT |
| | | TTATCAAGAAATTTATCAATTCAAAAATAAAATGATTGATAATCTTTCAGAG |
| | | AACGCAAAATCATTGTTAGATTCTGGAGTTGTTGTTTGTAAAGAAGCAACTC |
| | | ATAATATTACAAAGGATAATCGCTTTACAGAAGATACTTATCTTTTCCATTGT |
| | | CCTATTACAATGAACTTTAAGGCTCCTGATAAATCAAATAAAGAATTTAATA |
| | | ATCAAGTTCTTGAAGTATTGAGTGATAATCCTGATGTAAAAATTATTGGATTA |
| | | GATCGTGGAGAACGACACCTTATTTATCTTTCATTGATAAATCAAAAAGGTG |
| | | AAATTGAACTTCAAAAAACATTGAATCTTGTTGATCAAGTTAGAAATGATAA |
| | | AACTGTAAAAGTTAATTATCAAGAAAAACTTGTACACAAAGAAGGTGACAG |
| | | AGACAAGGCTCGTAAAAACTGGCAAACAATTGGAAATATCAAAGAATTAAA |
| | | AGAAGGATATCTTTCAAATGTTGTTCATGAAATTGCAAAAATGATGGTTGAA |
| | | CATAACGCAATTGTTGTTATGGAAGATTTGAATTTTGGATTTAAGCGGGGGC |
| | | GTTTTGCTGTAGAAAGACAGATTTATCAAAAATTTGAAAATATGTTAATTGA |
| | | AAAACTAAATTATCTTGTTTTCAAAGATAAAAAGGTAACAGAGCCTGGTGGG |
| | | GTTCTTAATGCTTATCAATTAACAAATAAATCTGCAAATGTATCTGATGTCTA |
| | | CAGACAATGTGGATGGCTTTTCTATATTCCTGCAGCTTATACTTCAAAGATTG |
| | | ACCCAAAAACTGGTTTTGCAAATCTTTTTATTACAAAAGGCTTAACAAACGT |
| | | AGAAAAGAAAAAAGAATTCTTTGACAAGTTTGATTCTATTCGTTATGACTCA |
| | | AAAGAAGATTGTTTCGTCTTTGGATTTGATTATGGAAAAATCTGTGATAATGC |
| | | TGATTTTAAGAAAAAGTGGGAAGTTTATACAAAAGGTGAACGACTTGTTTAC |
| | | AATAAAACAGAACGCAAGAATATTAGCATAAATCCAACAGAAGAATTGAAG |
| | | TCAATCTTTGATGACTTTGGAATAAATTGGAATAATGAAGATAATTTTATTGA |
| | | TTCTGTCCATACAATCCAAGCTGAAAAATCAAATGCAAAATTTTTTGATACA |
| | | CTTTTAAGAATGTTTAATGCAACTTTACAAATGAGAAATTCTATTCCAAACAC |
| | | AGAAATTGACTACTTAATTTCACCAGTAAAATCAGAAGACGGGACTTTCTTT |
| | | GATTCTAGAGAAGAATTGAAAAAAGGTGAAAATGCAAAATTGCCAATTGAT |
| | | GCAGATGCAAACGGAGCTTATCACATTGCATTAAAAGGCTTGTATTTGTTGG |
| | | AAAATGACTTTAACCGTAATGATAAAGGTGTAATTCAAAACATTTCTAACGC |
| | | CGATTGGTTTAAGTTTGTTCAGGGGAAAGAATATGAAAAATGA |

### Group 11 Sequences (SEQ ID Nos: 368-385)

TABLE S11A
Enzyme Sequences Group 11

| SEQ ID NO | Sequence |
|---|---|
| 368 | MKMSEQFCGQGNGYSISKTLRFELKPQGATLENIKKLKLIESDLQKSQDYKDVKIIIDNYHKY |
| | FIDEVLQNVNLDWTKLADALIEYSKTKEDDSNVIKEQDALRNEIVKLISKDERFKPLTAPTPK |
| | DLFNSLLPEWFEKNASSALNEKAVETFKKFCAYFKGFQENRKNMYKEEAIPTAVPYRIVHDN |
| | FPKFLQNVASFAEIQKKCPEIIEQTETELSAYLENEKLSDIFNVKNYNKYLCQTGAEKQRGIDF |
| | YNQVIGGIVQNENDKKLRGLNEFLNLYWQKHADFAKTNRKVKFIPLYKQILSDRTSLSFKIQ |
| | TIGSDQELKEAILSFAEKMNSKNNDGKTVFDVATELCETITQFDLSQIYVNQKDINNVSRILT |
| | GDWAYLQKRMNIFAEETLNKKEQKRWKKELDDDTSKTKGIFSFEELNAVLEYSSENCSPTTI |
| | RMQDYFGTTSRWYFDKQTEIFTKSGEIIEPSIKDLCAEIENNFIAMDKIFETVPSEKTLREKPAD |
| | VEKIKNYLDSVQNLLHRIKPLKVNGLGDANFYTAYDEVYXALGEVXSLYNKTRNYIAKKVG |
| | APEKFKLNFDNPTLADGWDQNKESSNTSIILIKDDKYFLGIMNAHDKPQFQEKXESNGEKCY |
| | QKMIYKLLXGPXKMLPKVFXXKKGISNFNPPKNILAGYDEXKHIKGDKFDIXXCHQLIDWX |
| | KDAISRHDDWKKFGFSFXATDSYKDXSDFYREVSXQGYKINXVXIPESXIDEMVXXXKLYL |
| | FQIYNXDFAEGASGTLNMHTLYWKNLFSKENLQDTVLKLNXEXELXYREKGINDPIVHKKG |
| | SKLVNKVTQDXFSIXTEIYTEIYKFENGKQDKLSDEARKYFDEHKVIVKTAGXDITKDRRFTE |
| | PXFLFHVPITINFKAQGNTFAMNEXVRKFLKNNPDVNIIGLDRGERHLIYLSLVNQNGEILKQ |
| | FXFXEVGRXKNGQLVKVNYHEKLDNREKERDAARKNWNXIGKIAELKEGYLSAVIHELAK |
| | LMIQYNAVIVMEDLNFGFKXGRFHVEKQVYQKFEHMLIDXLNYXXFXDKXFSEXGGVLNG |
| | YQLAGQFESXQKXGKQSXFLFXVXAAXTXKIDPKTGFADLLNLRDLXNVHKKRDFFSKFDX |
| | XXYXAETXSFAFXFDYKXFDGKGXSEMSATKWTVYSREKRIVYSPKSKSHSDVYPTXELKK |
| | IFXXXSIDFESGNNXIDSIMEXGAXLKQNEKPTXDVANFWDAMLRNFKLILQMRNXXXASG |
| | EDYXISPXKNXDGXFFDSRKEKXLGDKAKLXXDADANGAYHIALKGLLLLKRFXKTEESNX |
| | XKXXXXISXAXWFEFAQNRNN |
| 369 | LESDKKKSEDYKDAKKIIDNYHCYFIDDVLKTLSLNWENLAKEINEYRKSKSDDVNLLSAQQ |
| | KQRDEILKVFNSDKRFKALIASTPKDLFNKLLPEWFKKDNSVELNKEATETFKRFYSYFKGF |
| | QENRENVYSSKEIPTAVPYRIVNDNFPKFLSNISVFETIQKKCPDVITDVENELKEYLGNEKLS |
| | DIFSIQSFNKYLCQSGAENQRGIDFYNQIIGGIVEKDKEQNLRGINQFLNLYWQQHPEFAKNN |
| | KRIKMVPLFKQILSDRTSLSFKIEAIDSDDELIQAIEDCANKLEEKSKDDGKSIFEKCCELFDSI |
| | NEQDLNEIYINRKDINNFSRILTGDWAWLQARMNYYAEEKFTTKAEKSRWVKSLEDEGENK |
| | SKGFYTLAELNDVLKYSSDNIPETNIRIADYFGRRYRYFYEKETGNYIPSEELVALSIEEMCDD |
| | ILVKRKNMDKAFETSEKEKLQEDSETVSKIKDYLDSLQELLHRVKPLKVNGVGESSFYANFD |
| | TVYNALKEVISVYNKTRNYLTKKVASPEKYKLNFDNPTLADGWDLNKEQANTSVLFRKNG |
| | MFYIGIMNPKDKPKFAEKYEVKDEDFYEKMVYKLLPGPNKMLPKVFFSTKGKETFNPPKEIL |
| | NDYEKGKHKKGDSFDIDFCHKLIDWFKNAINQHEDWKKFDFKFSDTKNYKDISDFYREVTE |
| | QGYKLSFTNIPVSEIEKMVEDGKLYLFQIYNKDFSSESKGTPNMHTLYWKNLFSEENLKDVC |
| | LKLNGEAELFYRPVGIKNPIVHKKDSYLVNKLTKDGKSIPENIYEEIYKNANGKLDKLSKDAE |
| | EYKRTHDVVIKVAKHDIIKDKHYTVPKFLFHVPITINFKASGNSYSLNENVRKFLKNNPDVNI |
| | IGLDRGERHLIYLSLINQKGEILEQFSFNTVEQSRNDAEPRIIDYHEKLNQREKERDEARKSWQ |
| | TIGKIAELKEGYLSAVIHKLAQLMIKHNAIVVMEDLNFGFKRGRFHVEKQVYQKFEHMLIDK |
| | LNYLVFKDKGLTEAGGVLNGYQLASQFESFQKLGKQSGMLFYVPAGYTSKIDPKTGFVNMF |
| | NFKDLTNVHKKRDFFSNFKSISFDNDTDSFVFTFDYKDFNGKAKEEMFISKWSVYSREKRIV |
| | YYSKTKSYEDVLITEKLKSAFQKVNIDYTNGNDLLDSIMGIGADLKNGEKPSKEVADFWDTL |
| | LYNFKLILQMRNSNARTEEDYIISPVKAPDGTFFDSREEGKKEHNATLPKDADANGAYHIAL |
| | KGLSLLKRFDVADEKSLKKFDMKISNADWFKFVQEKEYKD |
| 370 | MEKTMDDFTNLYSLSKTLRFELKPIAETKENIEKGKFLESDKKKAADYKAVKKIIDNYHKYF |
| | IDDVLKNASFTWTKLEEAIKEYNKNRNDDSVVENEQKKLREEILKLFTSDKRYKALTAATPK |
| | DLFDTILPEWFGENSNPDLNKTALKTFQKFTSYFTGFQENRKNVYSAEPIPTAVPYRIVNDNF |
| | PKFLQNISIFKTIQEKCPQVIDDVEKELSSYLGKEKLADIFTLESFNKYLGQGGKENQRGIDFY |
| | NQIIGGIAEKEGEQNLRGINQFLNLYWQQNPEFAKENRRIKMVPLYKQILSDRSSLSFKIESIE |
| | NDEELKIALLECADKLEGKNEEKKSVFEDTCDLFESLKNQNLQEIYINRKDIKTVSRILTGDW |
| | SWLQTRMNVYAEEKFTTKAEKARWQKSLDDEGENKSKGFYSLAELNKVLEYSSENVTETDI |
| | RITDYFEHRCRYYIEKESERFVQGSELIALSIKEMCDDIQTKRKGMDRVLENLSDEKLLKEKT |
| | EDIAVIKNYLVAVQNLLHRIKPLKVNGVGDSSFYAIYDSIYSALSEVISVYNKTRNYITKKAA |
| | SPEKYKLNFDNPTLADGWDLNKEQANTSVLLRKDGMYYLGIMNPKNKPKFAEKYEVADGQ |
| | SCYEKMIYKQFDATKQIPKCSTQKKEVQKYFLSGATEPYILNDKKSFKSELIITKDIWFMNNH |
| | VWNGEKFVPKRDNETRPKKFQIGYFKQTGDFDGYKNALSKWISFCKEFLQSYISSTVYDYNF |
| | KKSDEYEGLDDFYNYLNATCYKLTFINIPESEIEKMVSEGKLYLFQIYNKDFAPGANGRPNM |
| | HTLYWKNLFSDENLKNVCLKLNGEAELFYRPAGIKDPVVHKEGSYLVNRTTEDGESIPEKIY |
| | LEIYKNANGKLDSLSDEAKSYKENHKIVIKKASHEIIKDRHYTEAKFLFHVPITINFKASGNSF |
| | SINENVRRFLKNNPDVNIIGLDRGERHLIYLSLINQKGEILKQFTFNEVERDKNGQTVKVNYH |
| | EKLDQREKERDSARKSWQTVGKIAELKEGYLSAVIHQLTKLMVEYNAIVVMEDLNFGFKRG |
| | RFHVEKQVYQKFEHMLIDKLNYLVFKDRGLNEPSGVLNGYQLTGQFESFQKLGKQSGMLFY |
| | VPAGYTSKIDPKTGFVSMMNFKDLTNVHKKRNFFSNFNDIHFDDATGSFVFTFDYKNYDGK |
| | AKEEMKQTKWSVYSRDKRIVYFPKVKSYEDIQPTEKLKALFETAGIDYKSGNPILDSIMTIGA |
| | DLKEGAKPSKEIAEFWDGLLYNFKLILQMRNSNARTGEDYIISPVMADTGTFFDSREELKKG |
| | EDAKLPLDADANGAYHIALKGLELINKINLTDENELKKMKISISNADWFQFAQEKNYAKG |

TABLE S11B
Human Codon Optimized Nucleotide Sequences Group 11

| | Corresponding | |
|---|---|---|
| SEQ ID NO | AA | Sequence |
| 373 | 370 | ATGGAGAAGACCATGGATGATTTCACTAACTTATACAGCCTCAGCAAAACTCT |
| | | CCGCTTCGAATTGAAGCCTATTGCTGAAACCAAGGAAAATATCGAGAAAGGA |
| | | AAGTTTCTCGAGTCTGATAAAAAAAAGGCCGCCGACTATAAAGCCGTCAAGA |
| | | AAATCATAGACAACTACCATAAGTACTTCATTGATGATGTTCTCAAGAATGCC |
| | | TCCTTTACTTGGACCAAGCTGGAGGAAGCTATCAAGGAGTACAACAAAAATC |
| | | GCAACGACGACTCCGTGGTTGAAAATGAGCAGAAAAAACTGAGAGAGGAGA |
| | | TACTTAAGCTCTTCACCTCCGACAAGAGATATAAGGCGTTAACAGCTGCAACT |
| | | CCCAAGGATCTGTTTGACACCATTTTGCCGGAATGGTTCGGCGAGAACTCTAA |
| | | TCCTGACCTGAACAAAACTGCCCTGAAGACGTTCCAAAAATTCACGAGTTATT |
| | | TTACAGGGTTTCAAGAAAACCGCAAAAACGTGTATAGCGCAGAGCCCATTCC |
| | | AACTGCGGTGCCGTATAGGATTGTGAACGACAATTTTCCTAAGTTCCTGCAGA |
| | | ACATCAGTATTTTTAAAACCATCCAGGAGAAATGCCCACAGGTGATCGACGA |
| | | TGTAGAAAAAGAGCTCTCAAGCTATCTCGGTAAAGAAAAGCTTGCCGATATC |
| | | TTCACTCTGGAAAGCTTTAATAAGTACCTGGGCCAGGGCGGAAAGGAGAACC |
| | | AGCGTGGGATCGATTTCTACAATCAGATCATCGGTGGAATCGCGGAGAAGGA |
| | | AGGAGAACAAAATCTTCGCGGCATTAATCAGTTCCTTAATCTGTATTGGCAGC |
| | | AGAATCCTGAGTTCGCCAAAGAGAATAGGCGTATTAAAATGGTGCCCCTGTA |
| | | CAAGCAAATATTGTCTGACCGGTCAAGCCTCTCTTTCAAGATAGAGAGCATAG |
| | | AAAACGATGAAGAGCTGAAGATTGCTCTGCTAGAGTGTGCTGACAAACTAGA |
| | | AGGAAAGAACGAGGAAAAGAAGTCAGTTTTTGAAGACACCTGCGACTTATTC |
| | | GAGAGCCTCAAGAATCAAAATCTACAGGAGATCTACATCAATCGGAAAGATA |
| | | TCAAAACCGTCAGTCGCATTCTGACAGGGGATTGGTCTTGGTTGCAGACCCGA |
| | | ATGAACGTTTACGCAGAAGAGAAGTTTACAACTAAAGCCGAAAAAGCCCGCT |
| | | GGCAGAAAAGCCTTGATGACGAAGGAGAGAATAAGTCTAAAGGATTCTACTC |
| | | ACTCGCTGAATTAAACAAGGTCTTGGAATATAGCTCAGAAAATGTGACGGAA |
| | | ACCGATATTCGCATCACTGACTACTTCGAGCATAGGTGTAGATATTACATTGA |
| | | GAAAGAGTCAGAACGGTTCGTCCAGGGCTCGGAACTGATCGCTCTGTCCATTA |
| | | AGGAGATGTGTGATGATATCCAGACGAAGAGAAAGGGAATGGATAGAGTGCT |
| | | GGAGAACCTAAGTGATGAGAAACTGTTGAAAGAAAAGACCGAAGACATTGCC |
| | | GTCATTAAGAACTATCTGGTAGCAGTGCAAAATCTCCTGCATCGGATCAAGCC |
| | | ACTTAAAGTGAACGGTGTCGGAGATTCTTCCTTCTATGCAATATATGACTCGA |
| | | TCTATTCTGCCCTCTCAGAAGTGATCTCTGTCTACAATAAGACGAGGAACTAC |
| | | ATTACCAAAAAAGCCGCCTCCCCTGAGAAGTACAAGCTAAATTTTGACAACC |
| | | CTACACTCGCTGATGGATGGGACCTCAATAAGGAACAGGCAAACACCTCCGT |
| | | GTTGCTGCGCAAAGACGGGATGTATTACCTGGGGATAATGAACCCAAAAAAC |
| | | AAGCCTAAGTTTGCAGAGAAGTATGAGGTCGCCGATGGGCAGTCCTGTTACG |
| | | AGAAGATGATATATAAGCAGTTTGACGCCACAAAACAAATTCCCAAGTGCAG |
| | | CACCCAGAAAAAAGAGGTGCAGAAATATTTCCTCTCTGGCGCGACCGAACCA |
| | | TATATTCTGAACGACAAGAAAAGCTTCAAAAGCGAGCTAATCATCACCAAAG |
| | | ATATCTGGTTCATGAATAACCATGTGTGGAATGGCGAAAAATTTGTTCCTAAG |
| | | AGGGACAACGAGACTCGGCCCAAGAAGTTTCAGATTGGCTATTTCAAGCAGA |
| | | CAGGCGATTTTGACGGCTACAAAAATGCTCTGTCTAAGTGGATTAGCTTTTGC |
| | | AAGGAGTTCCTACAATCCTACATCTCTAGTACTGTGTACGACTACAATTTCAA |
| | | GAAAAGCGACGAGTACGAAGGACTTGACGACTTTTACAACTACCTTAATGCT |
| | | ACGTGTTATAAGCTGACCTTTATTAACATTCCCGAGTCCGAGATCGAGAAAAT |
| | | GGTGTCAGAGGGGAAATTGTACTTGTTCCAGATCTACAACAAGGATTTTGCAC |
| | | CTGGAGCAAACGGTAGGCCTAATATGCACACACTGTATTGGAAAAATCTGTTT |
| | | TCAGACGAGAATCTGAAGAATGTGTGCCTCAAGCTGAATGGAGAAGCCGAGT |
| | | TGTTCTATAGACCCGCCGGCATCAAGGACCCAGTGGTACATAAAGAGGGCTC |
| | | TTATCTGGTCAACCGAACTACAGAGGATGGGGAGTCAATCCCAGAAAAAATC |
| | | TACCTGGAGATATACAAGAACGCTAACGGTAAGCTGGACAGTCTCAGTGATG |
| | | AGGCCAAGTCTTACAAGGAGAACCATAAGATCGTGATAAAAAAGGCATCACA |
| | | CGAGATCATAAAGGATAGGCACTACACTGAAGCAAAGTTTCTCTTTCACGTTC |
| | | CTATTACCATTAACTTCAAAGCATCGGGCAACTCCTTCTCTATAAACGAGAAT |
| | | GTTCGAAGGTTCCTTAAAAACAACCCCGATGTGAATATCATTGGGCTCGACCG |
| | | TGGCGAACGGCATCTTATATACCTCAGTCTCATTAACCAGAAGGGGGAGATCC |
| | | TGAAACAATTTACGTTTAATGAGGTAGAGAGAGATAAGAATGGTCAGACAGT |
| | | GAAGGTGAATTACCACGAGAAGCTGGATCAGAGAGAGAAAGAACGTGACTCT |
| | | GCCCGCAAATCATGGCAAACAGTAGGGAAGATTGCTGAGCTTAAGGAGGGGT |
| | | ACCTGTCCGCCGTTATCCACCAGCTGACCAAGTTAATGGTTGAGTATAATGCC |
| | | ATCGTTGTGATGGAGGATCTGAACTTCGGATTTAAGAGGGGCAGATTTCATGT |
| | | CGAAAAGCAAGTGTATCAGAAATTCGAACACATGCTGATCGATAAGCTGAAC |
| | | TATCTGGTCTTTAAAGATCGGGGCCTTAATGAACCAAGTGGGGTGCTAAACGG |
| | | GTACCAACTGACCGGTCAATTCGAAAGTTTCCAGAAACTGGGCAAACAGTCG |
| | | GGTATGTTATTCTATGTCCCCGCCGGCTATACAAGCAAAATTGACCCAAAAAC |
| | | CGGGTTCGTATCCATGATGAATTTTAAAGACCTGACAAATGTGCACAAGAAG |
| | | CGGAATTTCTTCAGTAACTTCAATGACATTCACTTTGATGATGCTACAGGATC |
| | | CTTTGTGTTCACATTCGACTACAAGAACTACGACGGGAAAGCCAAGGAGGAG |
| | | ATGAAGCAGACCAAGTGGAGCGTATATTCCAGGGATAAACGAATCGTCTACT |
| | | TCCCCAAAGTCAAGTCCTATGAGGATATTCAGCCGACCGAGAAGTTGAAAGC |
| | | GCTTTTTGAAACTGCTGGCATAGACTACAAATCAGGAAACCCCATATTGGATA |
| | | GCATTATGACTATCGGCGCCGACCTCAAAGAAGGCGCTAAGCCGTCCAAGGA |
| | | AATCGCTGAATTCTGGGACGGTCTTTTATATAACTTTAAGCTGATCCTGCAGA |
| | | TGCGGAATAGTAACGCTAGAACAGGTGAGGACTACATCATAAGTCCAGTTAT |
| | | GGCTGACACCGGTACATTTTTTGATAGCCGAGAGGAATTAAAGAAAGGCGAA |
| | | GACGCCAAATTGCCCCTGGATGCAGACGCGAACGGAGCATACCACATTGCGC |
| | | TGAAAGGCTTAGAACTCATCAACAAGATCAACTTGACTGACGAGAATGAGCT |
| | | TAAGAAGATGAAGATCTCCATTAGCAACGCCGACTGGTTCCAGTTTGCCCAGG |
| | | AAAAGAATTATGCAAAAGGGTGA |

TABLE S11C
Direct Repeat Group 11

| SEQ | Direct Repeat | SEQ | Direct Repeat |
|---|---|---|---|
| ID NO | (Variant #1) | ID NO | (Variant #2) |
| 374 | ATCTACAACAGTAGAAATT | 375 | TCTACAACAGTAGAAATT |
| | TTGTATTGGTTTCAAAC | | TTGTATTGGTTTCAAAC |
| 376 | GTTTAAACGAACTATTAAA | 377 | TTTAAACGAACTATTAAA |
| | TTTCTACTGTTGTAGAT | | TTTCTACTGTTGTAGAT |
| 378 | ATCTACAACAGTAGAAATT | 379 | TCTACAACAGTAGAAATT |
| | TAATATGAAGTTCAAAC | | TAATATGAAGTTCAAAC |

TABLE S11D
crRNA Sequences Group 11

| SEQ | | |
|---|---|---|
| ID NO | Sequence | FIG. |
| 380 | GUUUGAAACCAAUACAAAAUUUCUACUGUUGUAGAU | FIG. 11A |
| 381 | GUUUAAACGAACUAUUAAAUUUCUACUGUUGUAGAU | FIG. 11B |
| 382 | GUUUGAACUUCAUAUUAAAUUUCUACUGUUGUAGAU | FIG. 11C |

### Group 12 Sequences (SEQ ID Nos: 386-398)

TABLE S12A
Enzyme Sequences Group 12

| SEQ | |
|---|---|
| ID NO | Sequence |
| 386 | LRSKMAKNTIFSKFTELYPVSKTLRFELKPIGKTLEKIKENGI |
| | IDHDKNKADNYVDAKKIIDEYHKYFISEALKGINLDWSPLRDA |
| | FIDSLTNRTQDSKKKLEDLQKTFRKKIAEKLAAHPHFKELTAT |
| | TPKDLFKNILPDHFGNDESIESFKGFSTYFKGFQENRQNIYSA |
| | EAISTGVPYRIVHDNFPKFLSNIETFQNIQKHCLSVLTDAETE |
| | LKKLLNGQKLVEIFNIDFFNNVVTQEGIDFFNQIIGGYTIENN |
| | TKIRGINEFANLYRQQNPEFAKLRIATRMIPLYKQILSDRDSM |
| | SFILEPFKDASQVQSAVKDFFEDHILHYTTDGSQINVLDKIAN |
| | LVASLNNFDSEKIFIARESLSQISQKIFGNWNSINDAFFEYCE |
| | KQFGSAQKTANKKKIDAKLKEDCYSIKEINCVIKKIDSSKQIL |
| | DYWKEFDSLKNNIESGDIYKKYVDFISLKFEPDEKLEKDDNIQ |
| | GLKAFLDAINEFLHYVKPLIVNHENGDTAFYNELMPLYDQLSN |
| | IIPLYNKTRDFATQKPSDSAKFKLNFENPTLADGWDQNNEAKN |
| | TSIILKKEGNYYLGIMNAKDKPKIDTYKVNSNEPHYDKMVYKL |
| | IPSPHMSLPKAFFSKKGLALYKPSMQILDGYNANKHKKGSSFD |
| | KKYCHQLIDFFKEAISAHPDWKNFKFNFSETASYDDTSAFYNE |
| | ISNQGYMLSFTSIPDSQIDTWIDEGKLFLFQIYNKDFAPGAKG |
| | KPNLHTLYWKATFSPENLKDVVFKLNGEAELFYRPCSIKKPYS |
| | HKIGEKMVNRITKDGRPIPDAIFGELFHYFNNSTKPSLSDDAK |
| | KYLDFVIVKDVKHEITKDKRYTEDKFEFHVPLTMNFKSSDGSR |
| | YINDRVKDFLKNNPDVNIIGIDRGERNLIYMTLINQKGEILIQ |
| | KSFNLVGNTNYHEKLSIREQERDAARRSWRSIGKIKELKEGYL |
| | SLVIHEIAKTMIENNAIIVLEDLNFGFKRGRFCVEKQVYQKFE |
| | KMLIDKLNYLVFKDCSDSEYGGILKGYQLTQKFTSFKDIRKQN |
| | GFLFYIPAAYTSKIDPTTGFVNLFNFTDLTNAEKKKDFLTNFD |
| | DITFDSKTNSFAFTFDYSKFKVFQTDFQKTWTVFTNGKRIVYD |
| | RESKKYNTIEPTTIIQEALEKQGVQCVDQLNVLAEIEKIETKN |
| | ASFFNSICYAFEKSLQMRNSNSETDDDYILSPVKNKNGVFFNS |
| | NEADDKLPKDADANGAFHIALKGLYLLQHISETDEKLKIPHEK |
| | WFEFVQSRNK |
| 387 | LSLFVAKKGYIKKNTILRSKMAKNTIFSKFTGLYPVSKTLRFE |
| | LKPIGQTLEKIKENGIIDHDKNKADNYVNAKKIIDEYHKYFIS |
| | EALKGVKLDWSPLRDAFIDSLTNRTQDSKKKLEDLQKTFRKKI |
| | AEKLAAHPHFKELTASTPKELFEKILPNHFGKEESVEAFKRFS |
| | TYFKGFQENRKNIYSADAISTGVPYRIVHDNFPKFLSNIETFQ |
| | NIQKHCPSVLTNAETELKELLNGQKLAEIFNIVFFNSIITQEG |
| | IDFFNQIIGGYTIENNKKIRGINEFTNLYRQQNPEFAKQRIAT |
| | RMIPLYKQILSDRESMSFILEPFKDASQVQSAVKDFFEDHILH |
| | YSTDGSQINVLDKISNLITSLNNFEPDKIFIARESLSQISQKF |
| | FGSWNSINDAFFEYCEKQFGSAQKAANKKKIDAKLKEDCYSIN |
| | EINHVIKQIDPSKQISDYWKELESFKNNIESGDLYKKYEDFIS |
| | LKFEPDAKLEKDDNIQGLKDFLDAINEFLHYVKPLTANHENGD |
| | TAFYNELMPLFDQLSNVIPLYNKTRDFATQKPSDSAKFKLNFE |
| | NPTLADGWDQNKEDANTSIILKKGENYYLGIMNAKDKPKIDTY |
| | KVTPDEPHYDKMVYKLLPGPNKMLPKVFFSAKGKEIYNPSKEI |
| | QDGYAAEKHKKGPSFDKRFCHQLIDFFKEGISNHPDWKNFNFN |
| | FSETSSYEDISAFYNEVSDQGYKLSFTPIPDSQIDTWIDEGKL |
| | FLFQIYNKDFAPGAKGKPNLHTLYWKATFSPDNLQDIVFKLNG |
| | EAELFYRPCSIKKPYSHKIGEKMVNRITKDGRPIPDAIFGEIF |
| | HYFNNSTKPSLSDDAKKYLDFVIVKDVKHEIIKDKRYTEDKFE |
| | FHVPLTINFKADDGSKRLNDQIKDFLKNNPDVNIIGIDRGERN |
| | LIYMTLINQKGEILIQKSFNLVGNTNYHEKLSIREQERDAARK |
| | SWRSIGKIKELKEGYLSLVIHEIAKTMIENNAIIVLEDLNFGF |
| | KRGRFCVEKQVYQKFEKMLIDKLNYLVFKDCSDSECGGILKGF |
| | QLTQKFESFQKMGKQNGFLFYVPAAYTSKIDPTTGFVNLFNFT |
| | DLTNAEKKKAFLTNFDDITYDSKTSTFALTFDYSKFKVFQTDY |
| | QKTWTIFTNGKRIVYDRESKTHNTIEPTTIIQEALEKQGIQCV |
| | DQLNVLTEIEKIEPTRENARFFDSICYAFEKTLQLRNSNSETG |
| | DDYILSPVKNKNGIFFNSNEADDKLPKDADANGAFHIALKGLY |
| | LLQHISETDEKLKIPHEKWFEFVQSRNK |

TABLE S12B
Human Codon Optimized Nucleotide Sequences Group 12

| | Corresponding | |
|---|---|---|
| SEQ ID NO | AA | Sequence |
| 388 | 386 | CTTCGTTCAAAAATGGCCAAGAATACCATCTTCAGTAAGTTTACTGAGTTGTA |
| | | TCCTGTGTCAAAAACCTTGCGATTCGAATTAAAACCAATAGGGAAGACACTG |
| | | GAAAAAATCAAGGAGAACGGAATTATCGATCACGACAAGAATAAAGCAGAC |
| | | AATTACGTGGATGCTAAGAAGATCATCGACGAGTACCACAAATACTTTATAA |
| | | GCGAGGCCCTTAAAGGGATCAATCTGGATTGGTCGCCATTGCGGGATGCCTT |
| | | TATTGATTCCCTGACTAACAGAACTCAAGATTCGAAGAAAAAGTTAGAGGAT |
| | | CTACAAAAGACCTTTCGCAAAAAGATCGCTGAAAAGTTGGCAGCACACCCAC |
| | | ATTTCAAGGAACTGACTGCCACAACACCCAAGGACCTGTTTAAGAACATTCT |
| | | GCCTGACCATTTCGGCAACGACGAATCAATCGAAAGCTTTAAAGGCTTTTCC |
| | | ACGTATTTTAAGGGTTTCCAAGAGAATAGGCAGAATATATACAGCGCTGAGG |
| | | CAATATCCACCGGTGTGCCTTACAGAATCGTGCATGACAACTTCCCAAAATT |
| | | TCTCAGCAATATTGAGACATTCCAGAACATCCAAAAGCATTGTCTGTCCGTG |
| | | CTGACTGACGCCGAGACTGAGTTGAAGAAGCTGTTAAATGGCCAAAAGCTG |
| | | GTGGAGATATTCAACATCGATTTCTTCAACAATGTCGTCACGCAGGAAGGTA |
| | | TTGATTTCTTCAATCAAATCATCGGGGGTTACACGATTGAAAACAACACCAA |
| | | AATTAGGGGAATCAACGAGTTCGCCAATCTGTACCGGCAGCAAAACCCAGA |
| | | GTTTGCCAAGTTGCGCATTGCCACCAGAATGATCCCCCTGTATAAGCAAATT |
| | | CTTTCGGATCGCGATTCTATGAGTTTTATACTCGAGCCTTTCAAAGACGCAAG |
| | | CCAGGTGCAGTCTGCCGTCAAAGACTTTTTCGAAGATCATATCCTTCACTATA |
| | | CAACAGATGGCTCTCAGATCAATGTGCTAGACAAGATTGCTAACCTCGTGGC |
| | | TAGTTTGAACAATTTCGACTCAGAAAAGATCTTCATAGCTAGGGAGTCACTG |
| | | AGCCAGATCTCTCAGAAGATCTTTGGCAATTGGAATTCAATTAACGATGCGT |
| | | TTTTCGAGTATTGCGAAAAGCAGTTTGGATCTGCCCAAAAAACTGCAAACAA |
| | | GAAAAAGATCGACGCCAAGCTCAAGGAGGATTGCTACAGTATCAAGGAGAT |
| | | CAATTGCGTGATTAAGAAGATCGACAGCTCAAAACAGATTTTAGACTACTGG |
| | | AAAGAGTTTGACTCTTTAAAGAACAACATCGAGTCCGGGGACATTTACAAGA |
| | | AGTATGTCGACTTCATTTCACTGAAGTTTGAGCCCGATGAGAAATTGGAGAA |
| | | AGACGACAATATTCAGGGGCTCAAGGCTTTCCTGGATGCCATTAATGAGTTT |
| | | CTTCACTATGTGAAACCGCTCATTGTCAACCATGAAAATGGCGATACTGCAT |
| | | TCTATAACGAGCTAATGCCTCTGTACGACCAGCTGTCTAATATCATTCCGTTG |
| | | TACAACAAAACACGCGATTTCGCGACCCAGAAGCCTTCTGATTCCGCGAAGT |
| | | TCAAACTGAATTTCGAAAATCCAACCCTAGCCGACGGCTGGGATCAGAACAA |
| | | TGAAGCGAAGAACACTAGCATCATTTTGAAGAAGGAGGGCAACTATTATCTC |
| | | GGCATCATGAACGCTAAAGACAAACCCAAGATTGACACATATAAAGTAAAC |
| | | AGCAACGAACCACACTATGACAAGATGGTATACAAACTGATTCCCAGCCCCC |
| | | ACATGTCCTTGCCCAAGGCCTTCTTTAGTAAGAAAGGACTTGCCCTCTATAAA |
| | | CCTAGTATGCAGATCTTAGACGGTTATAATGCCAATAAACATAAGAAGGGAT |
| | | CTAGCTTCGACAAAAAATACTGCCACCAGCTCATCGATTTCTTTAAAGAGGC |
| | | CATCTCCGCTCACCCCGACTGGAAGAACTTTAAATTTAACTTCAGCGAGACT |
| | | GCATCGTACGATGATACCTCTGCATTTTACAACGAGATTAGCAATCAGGGGT |
| | | ACATGCTGAGTTTCACATCTATTCCTGACTCCCAGATAGATACCTGGATCGAC |
| | | GAAGGGAAGTTATTCCTGTTTCAGATCTACAACAAAGATTTTGCACCAGGCG |
| | | CTAAAGGGAAACCGAATCTGCACACCCTGTATTGGAAGGCGACGTTTAGTCC |
| | | TGAGAACCTGAAAGACGTCGTTTTTAAACTGAACGGCGAAGCTGAGCTCTTC |
| | | TATCGGCCCTGCAGTATAAAAAAGCCGTACTCCCACAAAATCGGTGAAAAGA |
| | | TGGTCAATAGGATAACAAAGGATGGACGGCCAATTCCGGACGCGATCTTTGG |
| | | GGAACTGTTTCATTACTTCAACAATTCAACGAAGCCCTCTCTGAGCGACGAT |
| | | GCCAAGAAATACCTTGACTTCGTAATTGTTAAGGATGTGAAGCATGAGATTA |
| | | CGAAAGACAAGCGCTATACCGAAGATAAGTTTGAGTTTCACGTCCCTCTAAC |
| | | AATGAATTTTAAAAGCAGCGATGGGTCAAGATACATCAATGACCGTGTGAAA |
| | | GACTTTCTTAAGAATAACCCTGACGTGAATATCATTGGCATCGATCGAGGCG |
| | | AGCGCAATCTTATCTATATGACCCTCATCAATCAGAAAGGGGAGATTCTTAT |
| | | CCAGAAGTCCTTCAACCTCGTTGGCAACACTAATTACCACGAAAAATTAAGC |
| | | ATCAGGGAGCAGGAAAGGGATGCTGCCCGACGGAGCTGGCGAAGTATCGGC |
| | | AAAATTAAAGAATTGAAGGAAGGGTATCTGTCACTCGTCATCCACGAAATAG |
| | | CTAAAACAATGATAGAGAACAACGCCATAATTGTTCTCGAGGATCTGAATTT |
| | | CGGATTTAAACGGGGAAGGTTTTGTGTTGAAAAACAGGTGTATCAGAAGTTC |
| | | GAAAAAATGCTCATCGACAAGCTGAATTACCTAGTGTTCAAAGACTGTTCAG |
| | | ACTCTGAATATGGTGGTATTCTGAAAGGCTATCAGCTGACCCAGAAGTTTAC |
| | | CTCCTTTAAGGACATTAGAAAGCAAAATGGATTCCTCTTCTACATCCCAGCTG |
| | | CCTATACGTCCAAAATTGATCCCACCACTGGATTTGTCAACCTCTTCAATTTC |
| | | ACCGATCTGACTAATGCAGAGAAGAAGAAGGATTTTCTGACCAATTTTGACG |
| | | ATATCACCTTTGACTCTAAGACAAATTCTTTTGCTTTCACTTTCGATTACTCCA |
| | | AGTTCAAGGTGTTCCAAACCGACTTCCAGAAGACATGGACAGTTTTCACCAA |
| | | TGGAAAGAGAATAGTGTATGACCGTGAGTCTAAAAAGTACAACACTATAGA |
| | | ACCCACCACAATCATACAGGAAGCGCTCGAGAAGCAGGGGGTGCAATGTGT |
| | | AGACCAGCTCAATGTTCTTGCCGAGATTGAGAAAATCGAGACAAAAAACGC |
| | | AAGTTTCTTTAACTCCATTTGTTACGCATTCGAAAAGTCCCTTCAGATGAGAA |
| | | ACTCCAACAGCGAAACCGACGACGATTACATATTGAGTCCCGTTAAAAACAA |
| | | GAACGGCGTATTCTTTAACTCCAACGAGGCCGATGATAAACTGCCAAAAGAT |
| | | GCCGACGCTAACGGCGCCTTTCACATTGCACTAAAAGGACTGTACCTGCTGC |
| | | AGCATATATCAGAAACTGACGAAAAACTGAAGATTCCTCATGAGAAGTGGTT |
| | | CGAGTTCGTGCAGAGCCGGAACAAGTGA |

TABLE S12C
Direct Repeat Group 12

| SEQ | Direct Repeat | SEQ | Direct Repeat |
|---|---|---|---|
| ID NO | (Variant #1) | ID NO | (Variant #2) |
| 390 | GCCTAGAAACTTCAAAAAA | 391 | CCTAGAAACTTCAATCTT |
| | TTTCTACTCTTGTAGAT | | GTAGAT |
| 392 | GCCTAGAAGCTTCAAAAAA | 393 | GCCTAGAAGCTTCAAAAA |
| | TTTCTACTCTTGTAGAT | | ATTTCTACTCTTGTAGAT |

TABLE S12D
crRNA Sequences Group 12

| SEQ | | |
|---|---|---|
| ID NO | Sequence | FIG. |
| 394 | GCCUAGAAACUUCAAAAAAUUUCUACUCUUGUAGAU | FIG. 12A |
| 395 | GCCUAGAAGCUUCAAAAAAUUUCUACUCUUGUAGAU | FIG. 12B |

TABLE S12E
Consensus Sequence Group 12

| SEQ | |
|---|---|
| ID NO | Consensus Sequence |
| 396 | LSLFVAKKGYIKKNTILRSKMAKNTIFSKFTXLYPVSKTLRFE |
| | LKPIGXTLEKIKENGIIDHDKNKADNYVBAKKIIDEYHKYFIS |
| | EALKGXXLDWSPLRDAFIDSLTNRTQDSKKKLEDLQKTFRKKI |
| | AEKLAAHPHFKELTAXTPKXLFXXILPBHFGXXESXEXFKXFS |
| | TYFKGFQENRXNIYSAXAISTGVPYRIVHDNFPKFLSNIETFQ |
| | NIQKHCXSVLTBAETELKXLLNGQKLXEIFNIXFFNXXXTQEG |
| | IDFFNQIIGGYTIENNXKIRGINEFXNLYRQQNPEFAKXRIAT |
| | RMIPLYKQILSDRXSMSFILEPFKDASQVQSAVKDFFEDHILH |
| | YXTDGSQINVLDKIXNLXXSLNNFXXXKIFIARESLSQISQKX |
| | FGXWNSINDAFFEYCEKQFGSAQKXANKKKIDAKLKEDCYSIX |
| | EINXVIKXIDXSKQIXDYWKEXXSXKNNIESGDJYKKYXDFIS |
| | LKFEPDXKLEKDDNIQGLKXFLDAINEFLHYVKPLXXNHENGD |
| | TAFYNELMPLXDQLSNXIPLYNKTRDFATQKPSDSAKFKLNFE |
| | NPTLADGWDQNXEXXNTSIILKKXXNYYLGIMNAKDKPKIDTY |
| | KVXXBEPHYDKMVYKLJPXPXXXLPKXFFSXKGXXJYXPSXZI |
| | XDGYXAXKHKKGXSFDKXXCHQLIDFFKEXISXHPDWKNFXFN |
| | FSETXSYXDXSAFYNEXSBQGYXLSFTXIPDSQIDTWIDEGKL |
| | FLFQIYNKDFAPGAKGKPNLHTLYWKATFSPXNLXDXVFKLNG |
| | EAELFYRPCSIKKPYSHKIGEKMVNRITKDGRPIPDAIFGEJF |
| | HYFNNSTKPSLSDDAKKYLDFVIVKDVKHEIXKDKRYTEDKFE |
| | FHVPLTXNFKXXDGSXXJNDXXKDFLKNNPDVNIIGIDRGERN |
| | LIYMTLINQKGEILIQKSFNLVGNTNYHEKLSIREQERDAARX |
| | SWRSIGKIKELKEGYLSLVIHEIAKTMIENNAIIVLEDLNFGF |
| | KRGRFCVEKQVYQKFEKMLIDKLNYLVFKDCSDSEXGGILKGX |
| | QLTQKFXSFXXXXKQNGFLFYXPAAYTSKIDPTTGFVNLFNFT |
| | DLTNAEKKKXFLTNFDDITXDSKTXXFAXTFDYSKFKVFQTDX |
| | QKTWTXFTNGKRIVYDRESKXXNTIEPTTIIQEALEKQGXQCV |
| | DQLNVLXEIEKIEXXXXNAXFFBSICYAFEKXLQXRNSNSETX |
| | DDYILSPVKNKNGXFFNSNEADDKLPKDADANGAFHIALKGLY |
| | LLQHISETDEKLKIPHEKWFEFVQSRNK |

Wherein:
each X is independently selected from any naturally
occurring amino acid.

TABLE S12F
Native Nucleotide Sequences Group 12

| | Corresponding | |
|---|---|---|
| SEQ ID NO | AA | Sequence |
| 397 | 386 | TTGAGGTCAAAAATGGCTAAAAATACCATATTCTCCAAGTTCACCGAACTTT |
| | | ACCCGGTTTCTAAAACCCTGCGCTTTGAATTGAAGCCCATTGGCAAAACCCTT |
| | | GAAAAAATCAAGGAAAATGGAATTATCGACCATGATAAAAACAAAGCCGAT |
| | | AATTATGTTGATGCGAAGAAAATTATAGATGAGTACCATAAATATTTCATCA |
| | | GCGAAGCATTAAAAGGAATCAACTTAGACTGGTCACCACTCCGTGACGCATT |
| | | TATAGATTCATTGACCAACAGAACTCAAGATAGCAAGAAAAAACTCGAGGA |
| | | TTTGCAGAAGACTTTCAGAAAAAAAATTGCCGAAAAACTTGCTGCACATCCA |
| | | CACTTTAAGGAACTAACAGCCACAACGCCTAAAGATTTGTTTAAAAATATTC |
| | | TTCCGGATCATTTTGGGAACGACGAATCTATTGAATCTTTTAAAGGATTTTCT |
| | | ACTTACTTTAAGGGTTTCCAAGAAAACAGGCAGAACATCTATTCTGCAGAAG |
| | | CAATAAGCACTGGAGTGCCATACCGAATTGTTCATGACAATTTTCCTAAATTT |
| | | TTATCCAACATTGAAACTTTCCAGAACATTCAAAAGCATTGTCTTTCTGTTCT |
| | | TACCGACGCCGAAACAGAATTAAAAAAACTACTAAACGGCCAAAAACTTGT |
| | | TGAAATATTCAATATTGATTTTTTCAACAATGTTGTCACACAAGAAGGTATCG |
| | | ATTTCTTCAATCAGATAATCGGCGGCTACACAATTGAAAACAATACTAAAAT |
| | | TCGCGGAATCAACGAATTTGCAAATCTCTACCGTCAACAAAATCCTGAGTTC |
| | | GCAAAACTGCGCATCGCAACTAGAATGATTCCCTTGTACAAGCAAATCTTAA |
| | | GCGATCGGGATTCAATGTCGTTCATTCTAGAACCTTTCAAAGACGCTTCTCAA |
| | | GTGCAATCGGCTGTAAAGGACTTTTTTGAGGACCACATTTTGCATTATACTAC |
| | | CGATGGCTCTCAAATTAACGTTCTGGACAAAATTGCCAATTTGGTCGCCAGTT |
| | | TAAACAATTTTGATTCAGAAAAAATTTTCATTGCTAGAGAATCTCTTTCACAA |
| | | ATATCTCAAAAAATCTTTGGAAATTGGAATTCGATAAATGACGCCTTCTTTGA |
| | | ATATTGCGAGAAACAATTTGGCTCAGCACAAAAAACTGCTAATAAGAAAAA |
| | | AATTGATGCAAAATTAAAGGAAGATTGCTATTCAATCAAAGAAATAAACTGT |
| | | GTCATCAAAAAAATAGACTCTTCCAAACAAATATTGGACTATTGGAAAGAGT |
| | | TTGATAGTTTGAAAAATAATATTGAATCGGGTGACATTTATAAGAAATACGT |
| | | GGATTTTATATCTCTCAAATTTGAACCGGATGAGAAACTGGAAAAAGATGAC |
| | | AATATACAGGGCTTGAAGGCATTTCTCGATGCCATTAACGAATTCCTTCATTA |
| | | TGTCAAACCTTTGATTGTTAATCACGAAAACGGAGATACGGCTTTTTACAAC |
| | | GAACTAATGCCGTTATATGATCAGTTATCTAATATTATTCCTCTATATAACAA |
| | | AACCCGTGATTTCGCAACGCAGAAGCCATCAGATTCGGCAAAATTTAAACTC |
| | | AATTTTGAAAACCCCACTCTTGCAGATGGCTGGGATCAAAACAACGAAGCCA |
| | | AAAATACGTCCATAATTCTTAAGAAAGAGGGCAATTATTATTTGGGAATAAT |
| | | GAATGCCAAGGACAAACCTAAAATTGACACATATAAGGTTAACTCTAATGAG |
| | | CCTCATTATGACAAAATGGTTTACAAACTCATTCCCTCTCCACACATGTCTCT |
| | | TCCCAAGGCATTTTTCTCAAAAAAGGGGCTGGCGTTATACAAACCCTCTATG |
| | | CAAATATTAGATGGTTATAACGCAAATAAGCATAAAAAAGGGTCGTCTTTTG |
| | | ATAAGAAATATTGCCATCAATTAATTGATTTCTTCAAGGAAGCTATTTCTGCA |
| | | CATCCCGATTGGAAAAATTTCAAATTCAACTTCTCAGAAACAGCTTCTTATGA |
| | | TGACACTAGTGCTTTTTATAACGAAATTTCTAATCAAGGATACATGCTTTCAT |
| | | TTACTTCTATTCCCGATTCACAAATCGATACATGGATTGATGAAGGAAAGTT |
| | | ATTCCTGTTCCAGATTTACAATAAGGATTTTGCTCCAGGAGCAAAAGGCAAG |
| | | CCCAATTTGCATACATTATATTGGAAAGCAACATTCTCTCCCGAGAATTTGAA |
| | | AGATGTTGTATTTAAATTGAATGGAGAAGCAGAACTTTTCTATCGTCCTTGCA |
| | | GCATCAAGAAACCATACTCTCACAAAATCGGTGAAAAAATGGTGAACCGAA |
| | | TAACAAAGGACGGCAGGCCAATTCCTGACGCGATATTTGGAGAACTTTTCCA |
| | | TTATTTCAACAATTCGACAAAGCCTTCTTTGAGTGACGATGCTAAAAAATAC |
| | | CTTGATTTTGTAATCGTCAAAGATGTAAAGCACGAAATCACTAAAGACAAAC |
| | | GATACACCGAAGATAAATTTGAATTCCATGTGCCATTAACCATGAATTTTAA |
| | | ATCAAGTGATGGCAGTAGATACATAAATGATCGCGTAAAGGATTTCCTAAAG |
| | | AATAATCCTGACGTCAATATCATTGGAATTGACCGTGGTGAACGCAACCTAA |
| | | TTTATATGACTCTTATCAACCAGAAAGGTGAAATTCTGATACAAAAGAGTTT |
| | | TAATCTAGTCGGCAATACAAATTATCATGAAAAGCTGTCCATTCGCGAACAG |
| | | GAACGTGATGCCGCAAGGAGGAGCTGGCGAAGCATCGGGAAAATTAAGGAA |
| | | CTCAAAGAGGGCTACCTCAGCCTTGTCATCCATGAAATTGCCAAAACAATGA |
| | | TTGAAAACAACGCAATTATTGTTCTTGAAGATTTAAATTTTGGATTTAAGCGT |
| | | GGACGATTCTGCGTCGAAAAGCAAGTATATCAAAAGTTTGAGAAAATGCTAA |
| | | TTGACAAGCTCAATTATCTTGTTTTCAAAGATTGCTCGGATTCTGAATATGGT |
| | | GGAATTCTTAAAGGATATCAGCTTACTCAAAAATTTACGAGTTTCAAAGACA |
| | | TTAGAAAGCAGAATGGATTCCTTTTCTATATTCCCGCTGCTTACACTTCTAAA |
| | | ATAGATCCAACAACCGGTTTCGTGAATCTTTTCAATTTTACAGATTTAACGAA |
| | | TGCGGAAAAGAAAAAGGATTTTTTGACAAATTTTGATGACATTACTTTTGATT |
| | | CTAAAACAAATTCTTTTGCTTTTACTTTTGATTACAGCAAATTCAAAGTATTT |
| | | CAAACTGATTTCCAAAAGACATGGACAGTCTTCACCAATGGGAAGAGAATCG |
| | | TCTATGATCGAGAATCAAAGAAATATAACACAATTGAGCCGACAACGATAAT |
| | | ACAGGAGGCTTTGGAAAAGCAAGGCGTTCAATGTGTTGATCAATTAAATGTA |
| | | TTGGCTGAAATTGAAAAAATCGAAACAAAAAACGCTAGTTTCTTCAATTCTA |
| | | TATGTTATGCTTTTGAAAAATCATTGCAAATGAGAAATAGTAATTCTGAAAC |
| | | TGATGACGACTATATACTTTCTCCAGTAAAAAACAAGAATGGAGTATTCTTC |
| | | AATAGCAATGAAGCAGATGATAAACTTCCTAAAGATGCAGATGCAAATGGA |
| | | GCTTTCCACATAGCTTTGAAAGGATTGTATCTGTTGCAGCATATATCAGAAAC |
| | | AGATGAAAAATTAAAGATACCTCATGAAAAGTGGTTTGAATTCGTACAGTCT |
| | | CGGAATAAATAA |
| 398 | 387 | CTGTCATTATTTGTCGCAAAGAAAGGTTATATTAAAAAAAACACTATTTTGA |
| | | GGTCAAAAATGGCTAAAAATACCATATTCTCTAAGTTCACCGGACTTTACCC |
| | | GGTTTCTAAAACCCTGCGCTTTGAATTGAAACCCATAGGCCAAACCCTTGAA |
| | | AAAATCAAGGAAAATGGGATTATTGACCATGATAAAAACAAAGCCGATAAT |
| | | TATGTCAATGCGAAGAAAATTATAGATGAGTACCATAAATATTTTATCAGCG |
| | | AAGCGTTAAAAGGAGTCAAATTAGACTGGTCACCACTCCGTGACGCATTTAT |
| | | AGATTCATTGACCAACAGAACTCAAGATAGCAAGAAAAAACTCGAGGATTT |
| | | GCAGAAGACATTCAGAAAAAAAATTGCTGAAAAGCTTGCTGCGCACCCACA |
| | | CTTTAAGGAGCTAACAGCCTCAACACCCAAGGAACTATTTGAAAAGATTCTT |
| | | CCAAATCATTTTGGAAAAGAAGAATCTGTTGAAGCCTTTAAAAGATTCTCTA |
| | | CCTATTTTAAAGGATTCCAAGAAAACAGGAAAAACATCTATTCTGCCGATGC |
| | | AATAAGTACAGGAGTTCCATACCGAATTGTTCATGACAATTTTCCCAAGTTTT |
| | | TATCCAACATTGAAACTTTCCAGAACATTCAGAAACATTGTCCTTCCGTTCTT |
| | | ACCAATGCCGAAACAGAATTAAAAGAACTACTAAACGGACAAAAACTTGCA |
| | | GAAATATTCAATATTGTTTTTTTCAACAGCATTATCACGCAGGAAGGCATCG |
| | | ATTTCTTCAACCAGATAATCGGTGGATACACAATAGAAAACAACAAAAAAAT |
| | | TCGCGGAATCAACGAATTTACAAATCTTTATCGTCAACAAAATCCTGAATTT |
| | | GCAAAGCAACGAATCGCAACAAGAATGATTCCCTTATACAAGCAGATTTTAA |
| | | GCGATCGGGAATCAATGTCTTTCATTCTAGAACCCTTTAAAGACGCATCTCA |
| | | AGTACAATCGGCTGTAAAGGACTTTTTTGAGGACCACATTTTGCATTATAGTA |
| | | CCGATGGTTCCCAAATTAACGTTCTTGACAAAATTTCCAATTTGATCACCAGT |
| | | TTAAATAATTTTGAACCAGATAAAATTTTCATTGCTAGAGAATCTCTTTCACA |
| | | AATCTCTCAAAAATTTTTCGGAAGTTGGAATTCGATAAATGATGCATTCTTTG |
| | | AATATTGCGAGAAACAATTTGGCTCAGCACAAAAAGCAGCCAATAAGAAAA |
| | | AAATTGATGCGAAATTAAAGGAAGATTGTTATTCGATTAATGAAATAAACCA |
| | | TGTCATCAAGCAAATAGACCCATCCAAACAAATATCGGACTATTGGAAAGAA |
| | | TTAGAAAGCTTTAAAAACAATATTGAATCAGGGGACCTTTATAAGAAATATG |
| | | AGGATTTTATATCTCTCAAATTTGAACCAGATGCGAAACTGGAAAAAGATGA |
| | | CAATATACAAGGATTGAAGGATTTCCTCGATGCCATTAATGAGTTCCTTCATT |
| | | ATGTCAAGCCTTTAACAGCAAATCACGAAAACGGAGACACGGCTTTTTACAA |
| | | CGAACTAATGCCATTATTTGATCAGTTATCTAATGTTATTCCTCTATATAACA |
| | | AAACTCGTGATTTCGCAACGCAGAAGCCATCAGATTCGGCGAAATTTAAACT |
| | | CAATTTTGAAAATCCAACTCTTGCAGATGGCTGGGATCAAAACAAAGAAGAC |
| | | GCAAACACCTCAATAATTCTAAAAAAAGGTGAGAATTATTATTTGGGAATAA |
| | | TGAACGCCAAGGATAAGCCTAAAATTGACACCTATAAGGTCACCCCGGATGA |
| | | GCCTCACTATGACAAAATGGTTTATAAGCTTCTTCCTGGCCCAAACAAAATG |
| | | CTTCCTAAAGTTTTCTTCTCCGCTAAAGGAAAGGAAATTTACAATCCATCTAA |
| | | AGAAATTCAAGATGGATATGCCGCAGAAAAGCACAAAAAAGGTCCCTCTTTT |
| | | GACAAACGGTTCTGTCATCAGTTGATAGATTTCTTCAAGGAAGGCATTTCTA |
| | | ATCATCCAGACTGGAAAAATTTCAACTTTAACTTCTCAGAAACAAGTTCCTAT |
| | | GAAGACATTAGTGCCTTTTATAACGAAGTTTCTGACCAAGGTTACAAGCTTTC |
| | | GTTCACTCCTATTCCCGATTCACAAATCGATACATGGATTGACGAAGGAAAA |
| | | CTGTTCCTGTTCCAGATTTATAATAAGGATTTCGCACCAGGAGCGAAAGGCA |
| | | AGCCCAATTTACATACATTATATTGGAAGGCGACGTTCTCTCCTGATAATTTG |
| | | CAAGACATTGTATTTAAATTAAATGGTGAAGCAGAACTTTTCTATCGTCCATG |
| | | CAGCATCAAGAAACCATACTCTCACAAAATCGGTGAAAAAATGGTGAACCG |
| | | AATAACAAAAGACGGCAGGCCAATTCCTGACGCGATATTTGGAGAGATCTTC |
| | | CATTATTTCAACAATTCGACAAAGCCTTCTTTGAGTGACGATGCTAAAAAAT |
| | | ACCTTGATTTTGTAATCGTCAAAGATGTAAAGCACGAAATCATTAAAGACAA |
| | | ACGTTACACCGAAGATAAATTTGAATTCCATGTACCATTAACTATTAATTTCA |
| | | AGGCTGATGACGGCAGCAAACGCCTGAACGACCAGATTAAGGATTTTCTAAA |
| | | GAATAATCCTGATGTCAATATCATTGGAATTGACCGTGGTGAACGCAACTTG |
| | | ATTTATATGACTCTTATCAACCAGAAAGGTGAAATTCTGATACAAAAGAGTT |
| | | TTAATCTTGTCGGTAATACAAATTACCATGAAAAATTGTCCATTCGCGAACA |
| | | GGAACGTGATGCCGCAAGAAAGAGCTGGCGAAGCATCGGAAAAATCAAGGA |
| | | ACTCAAGGAGGGTTACCTCAGCCTTGTCATCCATGAAATAGCGAAAACAATG |
| | | ATTGAAAATAACGCTATCATTGTTCTTGAAGACTTGAATTTTGGATTTAAACG |
| | | TGGGCGATTCTGCGTCGAAAAGCAAGTGTATCAAAAATTTGAGAAAATGCTA |
| | | ATCGACAAACTCAATTATCTTGTTTTTAAAGATTGCTCAGATTCTGAATGTGG |
| | | GGGAATTCTTAAAGGATTCCAACTCACGCAGAAATTTGAAAGTTTCCAAAAA |
| | | ATGGGCAAACAAAATGGATTCCTTTTCTATGTTCCCGCAGCTTACACTTCTAA |
| | | AATAGACCCGACAACCGGTTTCGTAAATCTTTTCAATTTTACAGATTTGACAA |
| | | ATGCGGAAAAGAAGAAAGCGTTCCTAACGAATTTTGATGACATTACTTACGA |
| | | TTCTAAAACGAGTACCTTTGCTCTTACTTTTGATTACAGCAAGTTCAAAGTGT |
| | | TTCAAACCGATTATCAAAAGACATGGACCATTTTCACCAACGGGAAGAGAAT |
| | | TGTCTATGATCGAGAATCTAAGACTCATAACACAATTGAACCGACAACGATA |
| | | ATACAGGAGGCCTTGGAAAAGCAAGGTATTCAATGCGTTGATCAATTAAATG |
| | | TATTGACCGAAATTGAAAAAATTGAGCCCACTCGTGAAAATGCTCGTTTTTTC |
| | | GATTCTATCTGTTACGCTTTTGAAAAAACACTGCAATTGAGAAACAGTAATT |
| | | CTGAAACTGGTGATGACTATATACTTTCTCCAGTAAAAAACAAGAATGGAAT |
| | | ATTCTTTAATAGCAATGAAGCAGATGATAAACTCCCTAAAGATGCAGACGCA |
| | | AATGGAGCATTCCACATAGCTTTGAAAGGATTGTATCTGCTGCAACATATAT |
| | | CAGAAACCGACGAAAAATTAAAAATACCTCATGAAAAGTGGTTCGAATTCGT |
| | | ACAGTCTCGGAACAAATAA |

### Group 13 Sequences (SEQ ID Nos: 399-435)

TABLE S13A
Enzyme Sequences Group 13

| SEQ ID NO | Sequence |
|---|---|
| 399 | MKDLKQFIGLYPVSKTLRFELRPVGRTQEWMEKNHVLEHDGKRAEDYPRVKELIDAY |
| | HKICISNSLKVSDINWTPLRDAIEKNRQEKSDESKKALEEEQTKMRLEICKKLAKFEHY |
| | QELVKADTPSKLINGILPHDKALDTFNKFAVYFEGFQENRRNIYSSEAISTGVAYRLVH |
| | DNFPKFLANIEVFENIKEICPEVIQQVATEMAPFLEGVMIEDVFTVSYYNAVLTQNGID |
| | YYNQILGGVAKDDQKYRGINEFINLYRQAHPELATKKKSLTMVPLFKQILSDRETLSDI |
| | VRPVESEKQLIEVINNFYQRITNFDINGKNVNVVKELTDLVLSIDTYNPEGIFISAKSITD |
| | VSHSLYDHWNRINEKLYDKAVEAIGGVQTVKNKKKVEAYLKKDAYTLSELSFGDDV |
| | SISQYFSALTNSTDSINSLWLQFQSWCKSAEKPQFVHNEVGTEYVKMLLDAIMLVLHK |
| | CGALLVSLENELDSDFYNKFLPLYAELENVILVYTRVRNFLTKKLSDTGKIKLKFDTPS |
| | LGAGWGINKEKTNKAVLLFKDGLSYLGIMNVKGTLDFNCKIEADEPTFKKMVCRNYS |
| | KPYMDLPNSFFSQNGISKFHPSERIQKIYFAFKENSKNVDIKKVHELIDYYKDAISRHED |
| | WGSFGFKYSPTESYETINDFYTEVAAQSYKLRFIEVPQKQVDEWVEEGKLYLFQLYNK |
| | DYAEGAHGRKNLHTMYWECLFSEENLSNLFIKLGGQAELFYRPQSIKKPVSHKVGTK |
| | MLNRRAKDGKPIPDAIYRSLYQYFNGKKAEAELTTEEKAYISQVIVKDVHHEIIKDRRY |
| | TKQFFYQFHVPIVFNANAPQRPKINERVLEYIKENPDVNIIGIDRGERHLVYLTLINQRG |
| | EILKQKTFNVVGDYNYQEKLKQRENERDQARKSWQSVGKIKDLKEGFLSAVVHEIAK |
| | MMIENNAIVVLEDLNWGFKRGRFKVERQVYQKFEKMLIDKLNYLSFKDVDTSDEGGI |
| | LRGYQLTEPVANYTDIGKQTGFLFYIPAAYTSKIDPATGFVNHFNFNDITNAEKRKEFF |
| | MKMERIEMKNGNVEFEFDYRKFKTYQTDFQNVWTVNTSGKRIVFDTEKREHKAVYP |
| | TQEFVQAFGNKGITLEEGMDIKAFIGGIEADIKNASFFSSLFYAFKTTLQMRNSNADTR |
| | EDYILSPVVHDGRQFCSTDEVNKGKDADGNWISKLPVDADANGAYHIALKGLYLLM |
| | NPQTKKIENEKWLQFMAEKPYKE |
| 400 | MYDLKQFIGIYPVSKTLRFELKPIGRTQEWIEKNHVLEHDWKRAEDYPRVKEMIDVYH |
| | KLCISKSLKNMDFDWEPLRDAIERNRQEKSDESKKELEAEQTRMRNKIHDQLSKFEHY |
| | KKLNADTPSLLINHILPQEDALESFKKFATYFEGFQKNRKNIYSKEAISTGVPYRLVHD |
| | NFPKFLANIEVFENLQELCPEVIRQAATEMAPFLQGVMIEDVFTVGFYNAILTQDGIDF |
| | YNQILGGVVKDEQHYQGINQLTNLYRQAHPDLTANRKSMTMVPLFKQILSDRETLSDI |
| | AKPIESEEQLIEVVTSFYHRVTDFTLNGNSINIIDELATLVQSLNTYNPEGIFVSAKSLTD |
| | VSHTLYGHWNKINEKLYEKAVELFGDVQVVKNRKKVEAYLNKDTYTLAELSFGDDIS |
| | IAQYFENISGSADATNSLWVQFQSWCKTAEKPKFVHNEAGTELVKMLLDSILNVLHK |
| | CSVLVVSMENDLDKDFYNKFLPLYAELENVILLYNRVRNFLTQKPSSTGKIKLKFDIPS |
| | LGAGWGINKEKKNKAILLFKDGRSYLGIMNVKGTLDFDCKAEHGEPTYKKMVCVNH |
| | SKPYMDLPNSFFRQTGIDKYKPSERILKIYEAFKKDSKSVDINEVRELIDYYKDAITRNE |
| | DWNSVSFTYSPTETYETIDDFYKEVAKQSYQVSFKDISQKQVDEWVEKGQLYLFQLY |
| | NKDYAEGAHGRKNLHTLYWESLFTAENLSDIVIKLGSNAELFYRPQAIKKPVKHEVGT |
| | KMLNRRDNSGKPIPDTIYRSLYQFYNGKKAKAELTAEERAYISQVIVKDVQHEIIKDRR |
| | YTKQFHYQFHVPIVFNANANGKVKFNDKVMDYIQDNPDVNIIGIDRGERHLIYLTLINQ |
| | RGEILKQKTFNVVGNYDYQEKLKQREKERNEARRSWQSVGKIKDLKEGFLSAVVHEI |
| | AQMMIEHNAIVVLEDLNRGFKRGRFKVERQVYQKFEKMLIDKLNYLSFKDREIADEG |
| | GILCGYQLTEKTLNYSDIGRQTGFLFYIPAAYTSKIDPVTGFVNHENLNDITNAEKRKAF |
| | LMKMERIEVKNGNVEFEFDYRKFKTFQTDFQNVWTVNTSGKRIIFDTETRKAKDVYP |
| | TKEIAQSFANRGIALEEGMDLKAIIAEVEPDVKNAAFFKSLFYAFENTLRMRNSNTETQ |
| | EDYILSPVAINGKQFCTTDEANKGKDADGNWLSKLPVDADANGAYHIALKGLYLLNN |
| | PQTKKIENEKWFQFMIEKLYLK |
| 401 | MKDLKQFIGIYPVSKTLRFELRPVGKTQEWIEKNRVLENDESKAADYPVVKKLIDEYH |
| | KVCIRESMKDVHLDWAPLKEAMEEYQKKKSDDAKKRLEAEQTMMRKRIATAIKDFR |
| | HYKELTAATPSDLITSVLPEFSDNEALKSFRGFASYFIGFQENRNNIYSPDAISTGVPYRL |
| | VHDNFPKFLSNLEVYDKIKATCPEVIQQASEEIQPFLEGVMIDDIFSLDFYNSLLTQDGI |
| | DFFNRVIGGVSEEDKQKYRGINEFSNLYRQQHKELAGSKKALTMIPLFKQILSDRDTLS |
| | YIPAQIETENELMTSISQFYKHITYFERDGKTINVLNELVALLSKIDTYNPDGICVTANK |
| | LTDISQKVFGKWSIIEENLKEKAVQQFCDISVAKNKKKVDAYLSRKAYCLSDLCFDDE |
| | FHISQYFSDLPQTLNAIEGYWLQFNEWCKNDEKQKFLNNPAGTEVVKSLLDAMMELS |
| | HKCSVLVMPEEYEVDKSFYNEFIPLYEELDTLFLLYNKVRNYLTRKPSDVKKFKLNFE |
| | TPSLADGWDQNKERANKAILLFKDGLSYLGIMNAQNMPNLNQKWSADESHYSKMVY |
| | KLIPGPNKMLPKVFFSKKGLDIFNPSRHILRIKEEETFKKGSPNFKLADLHDLIDFYKDGI |
| | NRHPDWSKFNFQFADTKAYEDIAGFYRDIANQAYKITFSDIPVWQINDWIDNGQLYLF |
| | QLYNKDYAEGAHGRKNLHTLYWENLFTDENLSNLVLKLNGQAELFCRPQSIKKPVSH |
| | KMGSKMLNRRDKSGMPIPESIYRSLYQFYNGKKKESELTAAEKQYMDQVIVKDVTHE |
| | IIKDRRYTRQEYFFHVPLTFNANAEGNEYINENVLNYLKDNPDVNIIGIDRGERHLIYLT |
| | LINQRGEILMQKTFNVVNSYNYQAKLEQREKERDEARKSWDSVGKIKDLKEGFLSAVI |
| | HEICKMMIENNAIVVLEDLNFGFKRGRFKVERQVYQKFEKMLIDKLNYLSFKDREAEE |
| | DGGILRGYQMAQKFVSFQRLGKQSGFLFYIPAAYTSKIDPITGFVNHFNFNDITNAEKR |
| | KEFLMKMERIEMRNGNIEFEFDYRKFKTFQTDYQNLWTVSTYGKRIVMRIDDKGYKQ |
| | MVDYEPTKDIVNTFKNKGIQLTEGSDLKALIADIEANATNAGFFNTLLYAFQKTLQMR |
| | NSNAATEEDFIFSPVARDGRYFCSMDEANKGRDAQGNWVSKLPIDADANGAYHIALK |
| | GLYLLRNPETKKIENEKWLQFMVEKPYLE |
| 402 | MLNLNYYLFYFVSLWQDNEYLKPITMNNLKQFIGIYPVSKTLRFELRPIGKTQEWIEIN |
| | KVLEGDVQKAADYPTVKKLIDEYHKICIHDSLKNVHFDWAPLKEAIVIFQKTKSDESK |
| | KRLEAEQTIMRKQIAAAIKDFKHFKELTAATPSDLITSVLPEFSDDDSLMSFRGFATYFS |
| | GFQENRINIYSQESISTGVPYRIVHDNFPKFLSNQEVYDRIRSVCPEVIKQASEELQPFLE |
| | GVMIDDIFSLDFYNSLLTQDGIDFYNRVIGGVSEEGKQKYRGINEFSNLYRQQHKDLA |
| | ASKKAMTMIPLFKQILSDRETLSYIPVQIESEDELVSSIKQFYEHITHFERDGKTVNVLSE |
| | LVAVLGNIDSYNPDGICISASKLTDISQKVYGKWSIIEEKLKEKAIMQYGDISVAKNKK |
| | KVDAYLSRKAYCLSDLCFDEVVSFSRYYSELPQMLNAINGYWMQFNEWCRSDEKQK |
| | FLNNPMGTEVVKCLLDAMMELYHKSAVLVMPEEYEVDKSFYNEFIPLYEELDTLFLL |
| | YNKVRNYLTRKPSDVKKFKLNFESPSLASGWDQNKEMKNNAILLFKDGKSYLGVLN |
| | AKNKAKIKDAKGDASSSSYKKMIYKLLSDPSKDLPHKLFAKGNLDFYKPSEYILEGRE |
| | LGKYKKGPNFDKKFLHDFIDFYKAAIAIDPDWSKFNFQYSPTESYEDIGAFFSEIKKQA |
| | YKIRFTDITESQVNEWVDNGQLYLFQLYNKDYAEGAHGRKNLHTLYWENLFTDENLS |
| | NLVLKLNGQAELFCRPQSIKKPVSHKIGSKMLNRRDKSGMPIPENIYRSLYQFYNGKK |
| | KESELTTAEKQYMDQVIVKDVTHEIIKDRRYTRQEYFFHVPLTLNANADGNEYINEQV |
| | LNYLKYNPDVNIIGIDRGERHLIYLTLINQRGEIIKQKTFNIVNNYNYQVKLEQREKERD |
| | EARKSWDSVGKIKDLKEGFLSAVIHEITKMMIENNAIVVLEDLNFGFKRGRFKVERQV |
| | YQKFEKMLIDKLNYLSFKDREVGEEGGILRGYQMAQKFVSFQRLGKQSGFLFYIPAAY |
| | TSKIDPVTGFVNHFNFNDITNAEKRKDFLMKMERIEMKNGYIEFTFDYRKFKTYQTDY |
| | QNVWTVSTFGKRIVMRIDEKGYKKMVDYEPTNDIIYAFKNKGILLSEGSDLKALIADV |
| | EANATNAGFFGTLLYAFQKTLQMRNSNALTEEDFILSPVAKDGHHFCSTDEANKGRD |
| | AQGNWVSRLPVDADANGAYHIALKGLYLLRNPETKKIENEKWFQFMVEKPYLE |
| 403 | MKDLKQFIGIYPVSKTLRFELKPIGKTLEWIKKNKVLESDEQKAEDYPKVKTLIDEYHK |
| | VCICESLKGVNFDWNPLRLALKEYQSSKSDESKAVLEKEQALMRKQIATVIKDFRHYK |
| | ELTTPTPQKLIDNVFPSIYESDALKSFNRFAVYFKGFQENRNNIYSSDAISTGVPYRLVH |
| | DNFPKFLADIEVFENIKTNCPEVIEQAATELQPFLEGVMIEDIFTIDFYNSLLTQDGIDFF |
| | NQVLGGVAEEGKQKYRGINEFSNLYRQQHPEQTAKKKTLTMIPLFKQILSDRDTLSYIP |
| | QQIESEQQLIELLNQFYSHITAFDYNGKTVDVLKELTKLTGNINKYNPDGIYLSAKSLT |
| | DVSQKLFSKWNVITERLSEEAIKRFGDVSITKNKKKIDAYLSKDAYALSEIPLDNDHSL |
| | SMFFAEFPKTIENVGSNWLQFMEWCKGESKQLFLNNADGTEIVKNFLDSIMEILHRCS |
| | VLVVSVEHDLDKDFYNDFLPLYAELENAVMVYNRVRNFLTKKPSDTKKFKLNFGVPS |
| | LGDGWDQNKERDNKAIILFKDGKSYLGIMNAKDMPIIKERDESTPSSYKKMIYKLLAD |
| | PAKDFPHTFFSKKGIDTYHPSRYILDGREQGKYKKGETFDKKFMRDFIDFYKDAVAKH |
| | PIWSKFNFVYSPTESYEDIGAFFNEVSKQAYKIRFSYIEESQINEWTEKGQLY |
| | LFQLYNKDYAEGAHGRKNLHTLYWESLFSPENLSNIVLKLNGQAELFYRPQSIKQPFS |
| | HKTGSKMLNRRDKSGMPIPEAIYRSLYQYFNGRKAESELTLVEKSYIDQVVVKDVTHE |
| | IVKDRRYTKPEFFFHVPITFNVNADGNEYINEQVMEYLKDNPDVNIIGIDRGERHLIYLT |
| | LINQRGEILKQKTFNIVGNYNYHAKLEQREQERDQARKSWQSVGKIKELKEGFLSAVI |
| | HEIAMMMIKYNAIVVLEDLNFGFKRGRFKVERQVYQKFEKMLIDKLNYLSFKDRKPD |
| | EAGGILRGYQLTQQFTSFQRLGKQSGFLFYIPAAYTSKIDPVTGFVNHFNFNDITNAEK |
| | RKAFFMKMERIEMRNGDIEFEFDYRKYKTYQTDYQNIWTVNSSGKRIVMRIDENGRK |
| | QMTDYFPTKEIVKAFSDKNITLCEGTDLKALMAVIDTSPKNASLYGTLFYAFQKTLQM |
| | RNSDSATEEDYILSPVTQNGKQFNTKDEADKGQDSAGNWVSKFPVDADANGAYHIAL |
| | KGLFLLMNQQTKKIENQKWLQFMVQKPYKS |
| 404 | MKDLKQFIGIYSVSKTLRFELRPIGKTQEWIEKNKILESDEQKAEDYPKVKTLIDDYHK |
| | VCIRESLRGVHLDWSPLRQALEEYQQTKSDESKAVLEKEQTSMRKQIAAAIKDFRHFR |
| | ELTAPTPQKLIDDVFPGIYEDEALKSFNRFALYFRGFQDNRNNIYSAEAISTGVPYRLVH |
| | DNFPKFLADIEVYENIKATCPEVIEQVAVEMQPFLEGVMIDDIFTLDFYNSLLTQDGIDF |
| | FNQVLGGVAEEGKQKYRGINEFVNLYRQQHPELTGKKKALTMVPLFKQILSDRETLS |
| | YIPQQIESEQQLIDVLSQFYAHITDYEYNGKTINVLKELSNLTNRIGDYNPAGIFLSAKTL |
| | TDVSQKLFGRWSAINDKLYEKAVSQFGDPAIVKDKKKIDAYLAKDAFALSEINLDSEH |
| | HLSTYFSEMALVVEQVGSSWLQFKEWCKGSDKQLFLNNADGTEIVKNLLDAMMDIL |
| | HRCAVLVVPIEYDLDKDFYNDFLPLYAELENVIFVYNRTRNYLTKKPSDTKKFKLNFG |
| | TPTLGDGWGVNNERKNKAILLFKEGLSYLGIMNVKGTLKFEETKDASLHSYKKMTCR |
| | YLSKPFMDLPHTFFSEKGISTFHPSERIMDIYKNGTFKKDSPSYSIAALHDLIDFYKDAIN |
| | KHEDWVKYGFSFSPTESYEDISSFYSEIAKQAYKISFTNVSEQQVNDWV |
| | ENGQLYLFQLYNKDYAEGAHGRKNLHTLYWENLFSEENLNNLVLKLGGQAELFYRP |
| | QSINKPAKHVVGSKMLNRRDKSGMPIPEPIYRSLYQYFNGKKQEDELTAAEKAYIDQV |
| | VVKDTNHEIVKDRRYTKPEYFFHVPIVFNANADGNEYINERVLDYLKDNPEVNIIGIDR |
| | GERHLIYLTLINQRGEILKQKTFNMVGNYNYHAKLELREKERDDARKSWKSVGKIKE |
| | LKEGFLSAVIHEIAVMMVENNAIVVLEDLNFGFKRGRFKVERQVYQKFEKMLIDKLN |
| | YLSFKDRMADEEGGILRGYQLALQFTSFQRLGKQSGFLFYIPAAYTSKIDPVTGFVNHF |
| | NLNDITNAEKRKAFLMNMERIEVKNGNVEFEFDYRKFKTYQTDYQNIWTVNTSGKRI |
| | VFDSETRKAKDVYPTQEIIAAFKEKGINLNDGTDLKPLIADIEANAKNASFYYAIFDAF |
| | KRTLQMRNSNAATEEDYILSPVVCNGKQFCTTDEVNKGKDADGNWLSKLPVDADAN |
| | GAYHIALKGLYLLNNPQTKKIENEKWFQFMVEKPYLE |

TABLE S13B
Human Codon Optimized Nucleotide Sequences Group 13

| | Corresponding | |
|---|---|---|
| SEQ ID NO | AA | Sequence |
| 405 | 399 | ATGAAGGACCTGAAGCAATTTATAGGCCTGTATCCGGTCAGTAAAACCCTG |
| | | AGATTCGAATTAAGGCCCGTC |
| | | GGACGTACACAGGAATGGATGGAGAAGAATCATGTGCTGGAGCACGATGG |
| | | CAAAAGAGCAGAAGATTATC |
| | | CAAGGGTTAAGGAACTAATAGATGCCTATCACAAGATCTGTATTAGCAATT |
| | | CGCTCAAAGTATCTGACATTAA |
| | | TTGGACGCCACTTCGGGACGCAATTGAGAAGAATCGACAGGAGAAGAGTG |
| | | ATGAAAGCAAAAAGGCTCTG |
| | | GAAGAAGAACAGACTAAAATGCGTCTGGAGATTTGTAAGAAGCTCGCCAA |
| | | ATTTGAGCACTATCAGGAACT |
| | | CGTGAAAGCCGACACACCTTCAAAATTAATCAACGGGATACTCCCTCACGA |
| | | TAAAGCGCTGGACACATTTAA |
| | | CAAGTTCGCTGTCTACTTTGAAGGCTTTCAGGAGAATCGGCGAAATATCTA |
| | | CTCTAGCGAGGCAATATCAAC |
| | | CGGTGTCGCCTACCGCCTGGTGCACGATAACTTCCCTAAATTCCTGGCGAA |
| | | TATCGAGGTCTTCGAAAACAT |
| | | AAAGGAAATTTGTCCAGAGGTTATACAGCAAGTGGCCACTGAGATGGCCC |
| | | CATTTTTGGAAGGAGTGATGAT |
| | | CGAGGATGTGTTTACCGTAAGTTATTATAACGCCGTTCTCACCCAGAACGG |
| | | GATCGACTATTACAACCAAATC |
| | | CTTGGTGGCGTTGCAAAGGACGACCAGAAGTATCGAGGTATCAACGAATTC |
| | | ATCAACCTTTACAGACAGGCT |
| | | CATCCAGAGCTGGCCACAAAAAAGAAAAGCCTGACTATGGTCCCTCTATTT |
| | | AAGCAAATATTAAGCGACAGG |
| | | GAGACACTGAGTGATATTGTCCGCCCAGTGGAAAGCGAGAAGCAGTTGAT |
| | | CGAAGTAATTAACAACTTCTAC |
| | | CAGCGCATCACTAACTTTGACATTAACGGTAAGAACGTCAATGTTGTTAAG |
| | | GAATTGACAGATCTGGTCCTGT |
| | | CAATCGACACATACAATCCTGAGGGAATCTTTATCTCCGCTAAGTCCATTA |
| | | CCGATGTGTCTCATTCCCTGTA |
| | | CGACCACTGGAACCGTATCAATGAGAAACTGTATGACAAAGCCGTGGAAG |
| | | CCATAGGAGGGGTGCAAACT |
| | | GTGAAGAATAAGAAGAAAGTGGAGGCCTATCTGAAAAAAGACGCATATAC |
| | | CTTGTCCGAACTGAGTTTCGG |
| | | GGATGATGTATCCATCTCGCAGTACTTTTCTGCCCTTACGAACAGTACTGAC |
| | | TCCATTAACTCCCTGTGGCTG |
| | | CAATTTCAATCATGGTGCAAGTCAGCTGAGAAGCCTCAATTCGTCCATAAC |
| | | GAGGTGGGTACTGAGTATGTG |
| | | AAAATGCTACTGGATGCTATCATGCTTGTACTGCACAAATGCGGCGCGCTG |
| | | TTGGTGTCCTTGGAGAATGAG |
| | | CTCGATAGCGACTTCTACAATAAATTCCTGCCCTTGTACGCTGAATTGGAG |
| | | AATGTTATCCTGGTCTATACCA |
| | | GAGTACGGAATTTTCTAACCAAAAAACTCTCCGACACGGGTAAGATCAAAC |
| | | TCAAATTTGATACGCCCTCAC |
| | | TAGGGGCCGGATGGGGGATTAACAAGGAGAAAACGAACAAGGCCGTGTTA |
| | | CTGTTTAAGGACGGCCTGAG |
| | | TTATCTGGGCATCATGAATGTCAAAGGAACATTGGACTTTAATTGCAAGAT |
| | | CGAAGCTGACGAACCTACATTT |
| | | AAGAAGATGGTCTGCCGGAATTATTCTAAGCCCTATATGGATCTTCCCAAC |
| | | AGCTTTTTCAGCCAGAACGGA |
| | | ATCTCTAAGTTTCACCCTTCCGAGCGAATCCAGAAGATATATTTCGCCTTCA |
| | | AGGAGAACTCCAAAAATGTTG |
| | | ACATCAAAAAGGTGCATGAGCTCATCGACTACTACAAAGATGCTATCTCCA |
| | | GGCACGAGGACTGGGGCTCTT |
| | | TCGGCTTCAAGTACTCACCCACCGAAAGCTATGAGACTATTAATGACTTCT |
| | | ACACAGAGGTGGCAGCACAGT |
| | | CTTATAAGCTTCGCTTTATAGAGGTGCCCCAAAAGCAGGTGGATGAGTGGG |
| | | TCGAAGAAGGAAAACTCTAC |
| | | CTGTTCCAGTTGTACAATAAGGACTACGCTGAAGGTGCACATGGCAGGAAG |
| | | AATCTCCATACAATGTATTGG |
| | | GAGTGTCTGTTTTCTGAGGAAAACTTGTCCAATCTGTTCATAAAGCTCGGG |
| | | GGGCAGGCAGAATTATTTTACC |
| | | GGCCTCAGTCAATCAAGAAACCCGTGAGCCATAAAGTCGGCACCAAGATG |
| | | TTGAATAGACGGGCTAAAGAT |
| | | GGCAAACCGATCCCGGATGCCATTTACAGATCCCTCTATCAATACTTCAAT |
| | | GGAAAGAAGGCCGAGGCGGA |
| | | ACTGACTACAGAGGAAAAAGCCTACATTTCTCAGGTTATCGTGAAGGATGT |
| | | GCACCATGAGATTATTAAAGA |
| | | TAGACGGTACACCAAACAATTCTTCTATCAGTTTCACGTTCCAATTGTTTTC |
| | | AACGCCAACGCACCACAGCGG |
| | | CCTAAAATCAATGAACGCGTACTCGAGTATATTAAGGAGAACCCGGACGT |
| | | AAATATCATTGGAATCGATCGG |
| | | GGGGAAAGGCACTTGGTGTACCTTACCCTCATTAACCAAAGGGGTGAGATC |
| | | CTTAAGCAGAAAACCTTTAAC |
| | | GTGGTTGGCGACTACAACTATCAAGAAAAACTCAAGCAGAGGGAGAACGA |
| | | GAGAGATCAGGCTCGCAAGT |
| | | CATGGCAGAGCGTCGGGAAGATTAAGGATCTCAAAGAGGGGTTCCTGAGC |
| | | GCCGTTGTGCACGAGATTGCC |
| | | AAGATGATGATTGAAAACAATGCCATAGTGGTGCTCGAAGACCTCAATTGG |
| | | GGATTCAAAAGAGGGCGGTT |
| | | TAAAGTGGAGAGACAGGTTTACCAAAAGTTCGAGAAGATGCTGATTGACA |
| | | AGCTGAATTACCTGAGTTTCAA |
| | | AGACGTGGACACATCTGACGAGGGCGGAATCCTACGAGGCTATCAGCTGA |
| | | CAGAGCCAGTGGCCAACTAC |
| | | ACTGATATAGGCAAACAGACTGGGTTCCTTTTCTACATCCCCGCTGCTTATA |
| | | CCAGTAAAATTGACCCTGCTA |
| 406 | 400 | CCGGATTCGTGAACCACTTCAATTTCAATGATATCACCAATGCCGAAAAAA |
| | | GGAAGGAGTTTTTCATGAAAA |
| | | TGGAGCGCATTGAAATGAAAAATGGTAACGTAGAGTTCGAGTTTGACTACC |
| | | GCAAGTTTAAGACCTATCAGA |
| | | CGGATTTCCAGAATGTATGGACCGTCAACACATCAGGCAAGCGCATTGTGT |
| | | TCGACACTGAAAAGCGAGAA |
| | | CATAAGGCTGTGTACCCAACTCAGGAGTTTGTGCAGGCTTTTGGCAACAAA |
| | | GGCATCACCCTTGAGGAAGGA |
| | | ATGGACATTAAGGCATTCATAGGTGGGATTGAGGCCGACATTAAGAACGCC |
| | | TCTTTTTTTTCGAGTCTGTTCT |
| | | ACGCGTTTAAAACTACACTTCAGATGAGGAACAGCAATGCGGATACCAGG |
| | | GAAGATTATATCCTTAGCCCCG |
| | | TCGTCCACGACGGGCGTCAGTTTTGCAGCACCGATGAGGTGAACAAGGGA |
| | | AAAGATGCAGATGGGAACTG |
| | | GATTTCTAAGTTACCCGTGGACGCAGATGCAAACGGCGCGTACCATATCGC |
| | | TCTAAAAGGCCTGTACCTGCT |
| | | CATGAATCCCCAGACTAAGAAGATCGAGAATGAAAAGTGGTTACAGTTCAT |
| | | GGCAGAGAAACCATACAAGG |
| | | AATGA |

TABLE S13C
Direct Repeat Group 13

| SEQ ID | | SEQ | |
|---|---|---|---|
| NO | Direct Repeat (Variant #1) | ID NO | Direct Repeat (Variant #2) |
| 411 | ATCTACAATAGTAGAAATTTAA | 412 | ATCTACAATAGTAGAAATTTAATA |
| | TATGGTCTTACA CC | | TGGTCTTACA CC |
| 413 | GCTGTAAGAGCATATTAAATTT | 414 | GCTGTAAGAGCATATTAAATTTCT |
| | CTACTATTGTAG AT | | ACTATTGTAG AT |
| 415 | GGTGTAAACCATAGTAAAATTT | 416 | GGTGTAAACCATAGTAAAATTTCT |
| | CTGCTATTGCAG AT | | GCTATTGCAG AT |
| 417 | ATCTGCAATAGCAGAAATTTTA | 418 | ATCTGCAATAGCAGAAATTTTACT |
| | CTATGGTTTACA CC | | ATGGTTTACA CC |
| 419 | GGTGCAAATACATATAAAATTT | 420 | GGTGCAAATACATATAAAATTTCT |
| | CTACTATTGTAG AT | | ACTATTGTAG AT |
| 421 | GCTGTTAGAGCATATGAAATTT | 422 | GCTGTTAGAGCATATGAAATTTCT |
| | CTACTATCGTAG AT | | ACTATCGTAG AT |

TABLE S13D
crRNA Sequences Group 13

| SEQ | | |
|---|---|---|
| ID | | |
| NO | Sequence | FIG. |
| 423 | GGUGUAAGACCAUAUUAAAUUUCUACUAUUGUAGAU | FIG. 13A |
| 424 | GCUGUAAGAGCAUAUUAAAUUUCUACUAUUGUAGAU | FIG. 13B |
| 425 | GGUGUAAACCAUAGUAAAAUUUCUGCUAUUGCAGAU | FIG. 13C |
| 426 | GGUGUAAACCAUAGUAAAAUUUCUGCUAUUGCAGAU | FIG. 13D |
| 427 | GGUGCAAAUACAUAUAAAAUUUCUACUAUUGUAGAU | FIG. 13E |
| 428 | GCUGUUAGAGCAUAUGAAAUUUCUACUAUCGUAGAU | FIG. 13F |

TABLE S13E
Consensus Sequence Group 13

| SEQ | |
|---|---|
| ID | |
| NO | Consensus Sequence |
| 429 | MLNLNYYLFYFVSLWQDNEYLKPITMKDLKQFIGIYPVSKTLRFELRPIGKTQEWIEK |
| | NKVLEXDEQKAEDYPXVKXLIDEYHKVCIXESLKXVHFDWAPLRXAIEEYQQXKSD |
| | ESKKXLEAEQTXMRKQIAXAIKDFRHYKELZTAXTPSKLIXSVLPXXXXDDALKSFN |
| | XFAXYFEGFQENRNNIYSSEAISTGVPYRLVHDNFPKFLANIEVXENIKXTCPEVIZQA |
| | ATEMQPFLEGVMIXDIFTLDFYNSLLTQDGIDFXNQVLGGVAEEGKQKYRGINEFSNL |
| | YRQQHPELXAKKKALTMXPLFKQILSDRETLSYIPQQIESEQQLIEVIXQFYXHITDFE |
| | XNGKTXNVLKELXALXGXIDTYNPDGIFXSAKSLTDVSQKLXGKWXIINEKLYEKAV |
| | EQFGDVSVVKNKKKVDAYLSKDAYXLSELXFDDDXSISQYFSELPQXLXAINSXWL |
| | QFXEWCKXXEKQKFLNNXXGTEXVKXLLDAXMEXLHKCSVLVVXEEYXLDKDFY |
| | NXFLPLYAELENVILXYNRVRNXLTKKPSDTKKFKLNFXTPSLGDGWXQNKERKNK |
| | AILLFKDGLSYLGIMNXKGTLXFZBXKXEAXESSYKKMVXKLLSKPYXDLPHXFFSK |
| | KGIDXXHPSERILXIYEZGXFKKGSPNFDIKFLHDLIDFYKDAIXRHXDWSKFNFQYSP |
| | TESYEDIGXFYSEXAKQAYKIRFXDIXEXQVNEWVENGQLYLFQLYNKDYAEGAHG |
| | RKNLHTLYWENLFXXENLSNLVLKLXGQAELFYRPQSIKKPVSHKVGSKMLNRRDK |
| | SGMPIPEAIYRSLYQXXNGKKAESELTAAEKAYIDQVIVKDVTHEIIKDRRYTKQEYF |
| | ZFHVPIXFNANADGNEYINEXVLXYLKDNPDVNIIGIDRGERHLIYLTLINQRGEILKQ |
| | KTFNVVGNYNYQAKLEQREKERDEARKSWQSVGKIKDLKEGFLSAVIHEIAKMMIE |
| | NNAIVVLEDLNFGFKRGRFKVERQVYQKFEKMLIDKLNYLSFKDREADEEGGILRGY |
| | QLXQKFXSFQRLGKQSGFLFYIPAAYTSKIDPVTGFVNHFNFNDITNAEKRKAFLMK |
| | MERIEMKNGNXEFEFDYRKFKTYQTDYQNVWTVNTSGKRIVXXXXDXXXXKMKD |
| | XYPTKEIVQAFKNKGITLEEGXDLKALIADIEANAKNASFFGTLFYAFQKTLQMRNSN |
| | AATEEDYILSPVAXBGKQFCXTDEANKGKDADGNWVSKLPVDADANGAYHIALKG |
| | LYLLXNPQTKKIENEKWXQFMVEKPYLE |

TABLE S13F
Native Nucleotide Sequences Group 13

| SEQ | | |
|---|---|---|
| ID | Corresponding | |
| NO | AA | Sequence |
| 430 | 399 | ATGAAAGACCTAAAACAATTCATCGGCTTATATCCTGTATCAAAGACAT |
| | | TGCGCTTTGAGTTGAGACCTGTGGGCAGAACGCAGGAGTGGATGGAAA |
| | | AGAATCATGTGTTGGAACATGATGGCAAAAGGGCTGAGGATTATCCCAG |
| | | AGTGAAGGAACTAATAGATGCTTACCACAAAATATGCATCAGCAACTCG |
| | | TTGAAAGTGTCTGATATTAATTGGACTCCGTTGCGAGATGCCATTGAAA |
| | | AGAATCGCCAAGAGAAGTCTGACGAGTCAAAAAAGGCATTGGAGGAAG |
| | | AGCAAACCAAGATGCGCCTTGAGATATGCAAGAAGCTGGCTAAGTTTGA |
| | | ACACTATCAGGAACTGGTAAAAGCCGATACGCCATCTAAGCTTATTAAC |
| | | GGTATTCTTCCTCATGATAAGGCTTTAGATACGTTCAACAAGTTTGCTGT |
| | | TTACTTTGAGGGCTTTCAGGAGAACAGGAGAAATATCTATAGTAGTGAA |
| | | GCTATCAGTACGGGCGTTGCTTATAGACTTGTTCACGATAATTTCCCAAA |
| | | GTTCCTGGCCAATATTGAGGTGTTTGAAAACATCAAGGAGATTTGTCCA |
| | | GAAGTCATCCAACAGGTAGCTACAGAAATGGCTCCATTCCTTGAAGGTG |
| | | TTATGATTGAGGATGTATTTACTGTCAGCTACTATAATGCCGTTTTAACT |
| | | CAAAATGGTATAGATTACTATAACCAGATTCTGGGCGGAGTGGCAAAAG |
| | | ATGATCAGAAGTATCGTGGCATCAATGAGTTTATAAACTTATACCGTCA |
| | | GGCTCATCCAGAGTTGGCTACAAAGAAGAAGTCGCTAACGATGGTGCCA |
| | | CTCTTCAAGCAGATTTTGTCAGACAGAGAAACACTTTCAGATATAGTTC |
| | | GCCCCGTTGAATCAGAGAAACAGCTGATAGAGGTGATAAACAATTTCTA |
| | | TCAACGCATTACTAACTTTGATATTAATGGAAAGAATGTCAACGTCGTT |
| | | AAAGAACTGACCGATTTGGTTTTAAGTATTGATACGTATAACCCTGAAG |
| | | GTATCTTTATTTCAGCCAAATCAATAACCGATGTATCTCATTCCTTATAT |
| | | GACCATTGGAATAGAATTAACGAGAAGCTTTATGACAAGGCTGTGGAGG |
| | | CAATTGGAGGTGTTCAGACAGTGAAGAACAAAAAGAAGGTGGAGGCTT |
| | | ATTTGAAAAAAGATGCCTATACGCTTTCTGAACTGAGCTTTGGCGATGAT |
| | | GTTTCTATCTCTCAGTATTTCTCTGCATTAACGAATTCCACTGACTCCAT |
| | | CAATAGCTTATGGTTGCAATTTCAGAGTTGGTGCAAGTCGGCAGAGAAA |
| | | CCACAATTCGTCCATAATGAGGTTGGTACGGAATACGTAAAGATGCTGT |
| | | TGGATGCTATCATGCTTGTATTGCACAAGTGCGGAGCACTTCTGGTATCC |
| | | TTGGAAAACGAATTGGACAGCGACTTCTATAACAAGTTCCTGCCGCTCT |
| | | ACGCAGAACTGGAGAATGTGATATTGGTTTATACAAGAGTAAGGAACTT |
| | | CCTCACCAAGAAGCTTTCTGATACAGGCAAGATAAAGCTGAAGTTCGAT |
| | | ACACCCTCGCTTGGTGCTGGATGGGGCATCAATAAAGAGAAGACGAATA |
| | | AAGCTGTATTATTGTTCAAGGACGGATTATCATATCTGGGTATTATGAAC |
| | | GTCAAAGGCACGTTAGACTTTAATTGCAAGATAGAAGCTGACGAGCCGA |
| | | CGTTCAAGAAAATGGTTTGCAGAAACTATTCCAAACCTTACATGGACCT |
| | | GCCTAATTCATTCTTCAGCCAGAACGGAATAAGCAAGTTCCACCCGTCT |
| | | GAGCGAATCCAAAAGATATATTTTGCATTCAAAGAGAATTCAAAAAACG |
| | | TTGATATCAAGAAGGTGCACGAACTGATAGATTACTACAAAGATGCTAT |
| | | CAGTCGCCATGAAGATTGGGGATCATTTGGCTTTAAGTATTCTCCCACAG |
| | | AATCCTACGAGACCATCAATGATTTCTATACAGAGGTGGCTGCGCAATC |
| | | ATACAAACTTCGTTTCATAGAAGTTCCCCAAAAACAAGTTGACGAGTGG |
| | | GTTGAAGAAGGAAAACTCTACTTGTTCCAACTATATAACAAAGATTATG |
| | | CAGAGGGCGCTCATGGTCGCAAGAATCTTCACACGATGTATTGGGAGTG |
| | | CCTCTTCTCTGAAGAAAATCTCAGCAACCTGTTCATCAAGTTGGGAGGTC |
| | | AGGCAGAATTGTTCTATCGCCCACAAAGCATCAAGAAACCAGTATCACA |
| | | TAAAGTTGGCACGAAGATGCTGAATCGCAGAGCGAAGGACGGAAAGCC |
| | | TATACCAGATGCTATATATCGTAGTCTCTATCAGTATTTCAATGGCAAGA |
| | | AAGCGGAAGCAGAACTGACCACAGAAGAAAAGGCCTATATCAGCCAGG |
| | | TCATCGTGAAGGATGTGCATCACGAAATCATCAAGGACAGACGTTACAC |
| | | CAAGCAGTTCTTCTATCAATTCCACGTGCCTATCGTGTTTAATGCAAATG |
| | | CTCCCCAAAGACCGAAGATTAATGAGAGGGTTTTGGAATACATCAAGGA |
| | | GAATCCAGACGTAAACATCATCGGAATAGACCGTGGTGAGCGCCACTTG |
| | | GTTTATCTTACCCTTATCAATCAGCGAGGAGAGATTCTGAAGCAGAAGA |
| | | CCTTCAACGTTGTTGGCGATTACAACTATCAGGAGAAACTAAAGCAGCG |
| | | CGAAAATGAACGAGACCAAGCGCGAAAGAGCTGGCAGAGCGTAGGTAA |
| | | AATCAAGGACCTGAAAGAAGGTTTCCTTTCTGCTGTTGTGCATGAGATA |
| | | GCCAAGATGATGATAGAAAATAATGCCATCGTGGTTCTTGAAGACCTGA |
| | | ATTGGGGATTCAAGCGTGGCCGTTTCAAGGTGGAACGCCAGGTGTATCA |
| | | GAAATTCGAGAAGATGCTGATTGACAAACTGAACTACCTGTCGTTCAAA |
| | | GATGTAGATACGTCAGATGAAGGTGGCATTCTTCGTGGTTACCAATTAA |
| | | CAGAGCCGGTGGCTAACTATACGGATATTGGCAAACAAACGGGCTTCCT |
| | | TTTCTATATTCCTGCTGCCTATACGTCAAAGATTGATCCTGCAACGGGGT |
| | | TTGTTAACCACTTCAACTTCAACGACATCACCAATGCCGAGAAGCGCAA |
| | | AGAATTCTTCATGAAGATGGAGCGGATTGAGATGAAGAACGGCAACGT |
| | | GGAGTTTGAGTTTGACTATCGCAAGTTCAAAACCTATCAGACGGACTTC |
| | | CAGAACGTGTGGACAGTTAATACCTCTGGTAAGCGTATCGTCTTCGATA |
| | | CTGAGAAGAGGGAGCACAAAGCTGTTTATCCTACGCAGGAATTTGTGCA |
| | | GGCTTTTGGCAATAAGGGTATAACGCTTGAAGAAGGAATGGATATCAAG |
| | | GCGTTTATTGGGGGAATCGAAGCTGACATCAAGAATGCGTCATTCTTCA |
| | | GTTCACTCTTCTATGCGTTCAAGACTACTCTGCAGATGCGTAACAGTAAT |
| | | GCCGATACAAGAGAGGACTATATCCTTTCGCCCGTAGTTCATGACGGCA |
| | | GGCAGTTCTGTTCTACAGACGAAGTCAACAAGGGCAAGGACGCAGACG |
| | | GCAATTGGATATCAAAACTACCTGTAGATGCCGATGCCAATGGTGCATA |
| | | CCACATCGCTCTGAAGGGTCTCTACCTACTAATGAACCCGCAA |
| | | ACAAAGAAGATAGAAAACGAAAAATGGCTCCAGTTCATGGCCGAAAAG |
| | | CCGTATAAGGAGTAA |
| 431 | 400 | ATGTACGACCTGAAACAATTTATCGGCATATATCCAGTTTCAAAGACGT |
| | | TGCGCTTTGAGTTGAAACCTATTGGCAGAACGCAGGAATGGATCGAGAA |
| | | GAATCATGTGCTGGAACATGATTGGAAGAGGGCTGAGGATTATCCCAGA |
| | | GTGAAGGAGATGATTGATGTTTACCACAAATTGTGCATCAGCAAGTCGT |
| | | TGAAAAACATGGATTTTGACTGGGAACCCCTGCGCGATGCAATTGAGCG |
| | | GAATCGTCAGGAGAAGTCAGACGAATCGAAGAAAGAATTGGAGGCAGA |
| | | GCAGACCAGGATGCGCAACAAGATACATGATCAGTTATCAAAATTTGAA |
| | | CATTACAAAAAGCTCAACGCCGATACGCCATCGTTGCTGATTAATCACA |
| | | TTCTGCCCCAAGAAGATGCCTTGGAGAGCTTCAAGAAGTTTGCTACGTA |
| | | TTTTGAGGGATTTCAGAAGAACAGAAAGAACATTTACAGCAAGGAGGC |
| | | CATCAGTACTGGTGTACCATACCGACTTGTACACGACAACTTCCCTAAGT |
| | | TCTTAGCAAACATTGAGGTCTTTGAAAACTTACAGGAGCTCTGCCCTGA |
| | | AGTCATTCGGCAGGCCGCTACAGAAATGGCACCTTTTCTGCAAGGAGTC |
| | | ATGATAGAGGATGTATTTACCGTCGGCTTTTATAACGCTATACTGACGCA |
| | | AGATGGCATTGATTTTTATAATCAGATTCTGGGTGGAGTGGTAAAAGAC |
| | | GAACAACACTATCAAGGTATTAACCAATTGACGAATCTCTACAGACAGG |
| | | CTCATCCAGACCTTACCGCCAATAGGAAATCGATGACAATGGTGCCGCT |
| | | CTTCAAGCAGATTCTGTCAGACCGCGAAACGCTTTCAGATATTGCCAAG |
| | | CCTATCGAGTCGGAAGAACAACTGATAGAGGTTGTAACCAGTTTCTACC |
| | | ATCGCGTTACGGATTTCACACTCAACGGAAACAGCATCAACATCATCGA |
| | | CGAGCTAGCGACTCTCGTGCAAAGTCTCAATACCTATAATCCTGAGGGA |
| | | ATATTCGTTTCGGCTAAGTCATTGACAGATGTCTCTCATACGTTGTATGG |
| | | GCATTGGAACAAGATCAACGAAAAACTCTATGAAAAGGCTGTCGAATTG |
| | | TTTGGTGATGTTCAGGTGGTCAAAAACAGAAAGAAGGTAGAGGCTTATC |
| | | TGAACAAAGACACATACACACTCGCAGAACTGAGTTTCGGCGACGATAT |
| | | TTCCATTGCACAATACTTCGAAAACATCTCTGGTTCCGCTGATGCCACAA |
| | | ACAGCCTTTGGGTACAATTCCAAAGCTGGTGCAAAACGGCAGAGAAGCC |
| | | AAAATTCGTACACAACGAGGCTGGTACAGAACTCGTTAAGATGCTGTTG |
| | | GATTCCATCTTGAACGTACTGCACAAATGCTCAGTTTTGGTTGTATCGAT |
| | | GGAAAACGACTTAGACAAAGACTTCTACAATAAGTTCTTGCCTCTCTAT |
| | | GCTGAATTGGAGAATGTGATATTGTTATATAACAGGGTGCGAAATTTCC |
| | | TCACGCAGAAGCCATCGAGTACGGGCAAGATAAAACTGAAGTTCGACA |
| | | TCCCTTCGCTTGGCGCTGGTTGGGGCATCAACAAGGAAAAGAAGAATAA |
| | | GGCAATATTGCTATTCAAAGATGGACGTTCTTATCTTGGCATTATGAATG |
| | | TTAAAGGAACGTTAGATTTTGACTGCAAAGCAGAACATGGCGAGCCTAC |
| | | ATACAAGAAAATGGTTTGCGTAAACCATTCCAAGCCTTACATGGATTTG |
| | | CCCAATTCATTCTTCCGTCAAACAGGCATTGACAAGTATAAGCCTTCAG |
| | | AGCGCATCTTGAAAATCTATGAGGCATTTAAGAAAGATTCAAAGAGTGT |
| | | AGATATCAATGAGGTGAGAGAACTTATAGACTATTACAAGGATGCTATC |
| | | ACCAGAAATGAAGACTGGAATTCTGTTAGCTTCACTTATTCTCCCACGG |
| | | AAACCTATGAAACCATTGACGACTTTTATAAGGAGGTCGCCAAACAATC |
| | | CTATCAAGTCAGTTTTAAGGACATATCCCAAAAACAGGTTGACGAATGG |
| | | GTTGAAAAGGGGCAGTTATATCTCTTCCAGCTTTACAACAAAGATTATG |
| | | CAGAAGGTGCTCATGGGCGCAAGAATCTTCATACCCTGTATTGGGAAAG |
| | | TCTCTTTACTGCTGAGAATCTAAGCGACATAGTTATAAAGCTGGGAAGC |
| | | AACGCAGAATTATTCTATCGTCCGCAGGCCATTAAGAAACCTGTAAAAC |
| | | ACGAGGTAGGCACAAAGATGCTAAACCGCAGGGATAATAGCGGAAAGC |
| | | CTATACCTGATACCATCTATCGTAGCCTCTATCAGTTCTACAACGGCAAG |
| | | AAAGCAAAAGCAGAACTGACGGCAGAAGAGCGTGCTTACATCAGTCAG |
| | | GTGATAGTGAAAGACGTGCAGCACGAAATCATCAAGGACCGCCGATAC |
| | | ACCAAGCAGTTCCACTACCAGTTCCACGTACCTATCGTGTTTAATGCGAA |
| | | TGCCAATGGGAAGGTCAAGTTCAACGACAAGGTGATGGACTACATCCAG |
| | | GATAATCCTGATGTCAACATCATCGGAATAGACCGTGGTGAGCGTCATC |
| | | TGATTTATCTGACATTAATAAACCAACGCGGCGAGATTCTGAAGCAGAA |
| | | AACCTTTAATGTGGTAGGCAACTATGACTATCAGGAGAAGCTGAAGCAG |
| | | CGTGAGAAGGAGCGCAACGAAGCCCGTAGAAGCTGGCAGAGCGTAGGT |
| | | AAGATTAAGGATCTGAAAGAAGGTTTTCTGTCAGCTGTGGTTCACGAGA |
| | | TAGCCCAGATGATGATTGAACATAACGCAATCGTCGTGCTCGAAGACCT |
| | | GAATCGCGGTTTTAAGCGCGGCCGCTTCAAGGTGGAACGTCAGGTGTAT |
| | | CAGAAGTTTGAGAAGATGCTGATAGACAAGCTGAACTATCTGTCGTTCA |
| | | AAGACCGCGAGATTGCTGATGAAGGCGGCATCTTGTGTGGTTACCAACT |
| | | GACGGAAAAGACATTGAACTACTCTGACATTGGTCGCCAGACTGGATTC |
| | | TTGTTCTACATTCCTGCAGCCTACACGTCGAAGATTGACCCTGTAACGGG |
| | | GTTTGTCAACCACTTCAACCTGAACGACATCACCAATGCCGAAAAGCGC |
| | | AAAGCATTCCTAATGAAGATGGAGCGCATCGAGGTGAAGAACGGCAAC |
| | | GTGGAGTTTGAGTTCGACTATCGTAAGTTCAAGACGTTCCAGACGGATT |
| | | TCCAAAATGTGTGGACTGTCAATACCTCAGGCAAGCGCATCATATTCGA |
| | | CACAGAGACGCGAAAAGCGAAGGATGTTTATCCTACAAAAGAGATTGC |
| | | TCAGTCTTTTGCCAATAGAGGCATTGCTCTTGAAGAAGGAATGGACCTG |
| | | AAAGCAATCATTGCAGAGGTTGAGCCGGATGTCAAGAATGCTGCGTTCT |
| | | TTAAGTCTTTGTTTTATGCATTTGAAAACACCTTGCGAATGCGTAATAGC |
| | | AATACTGAAACGCAAGAAGATTATATCCTGTCGCCAGTCGCTATCAACG |
| | | GCAAACAGTTCTGCACTACGGACGAAGCAAACAAGGGTAAGGATGCCG |
| | | ATGGCAATTGGCTTTCCAAACTCCCTGTTGATGCCGACGCCAATGGTGCC |
| | | TATCACATTGCCCTCAAGGGTCTCTACCTGCTAAATAACCCTCAAA |
| | | CAAAGAAGATAGAAAACGAAAAATGGTTCCAATTTATGATTGAAAAGC |
| | | TCTATTTAAAGTAA |
| 432 | 401 | ATGAAGGACTTAAAACAATTTATCGGCATATATCCAGTATCAAAGACTT |
| | | TGCGCTTTGAGTTAAGGCCTGTAGGCAAAACCCAGGAATGGATAGAAAA |
| | | GAACAGGGTGTTGGAAAATGATGAGAGTAAGGCTGCGGATTACCCTGTG |
| | | GTCAAGAAACTCATTGACGAGTATCATAAGGTTTGCATTCGCGAATCCA |
| | | TGAAAGATGTCCATCTTGACTGGGCACCTCTAAAGGAGGCCATGGAGGA |
| | | ATATCAGAAGAAGAAAAGCGATGATGCCAAGAAACGCCTGGAGGCAGA |
| | | ACAGACGATGATGCGCAAACGAATTGCTACTGCAATCAAGGATTTCAGA |
| | | CATTACAAGGAACTGACGGCAGCAACTCCCAGCGATTTGATTACATCAG |
| | | TATTGCCAGAGTTCAGTGATAATGAGGCTTTGAAATCATTTCGAGGATTC |
| | | GCTTCCTATTTCATAGGCTTCCAAGAGAATCGGAACAACATCTATAGTCC |
| | | TGATGCTATCAGTACGGGTGTCCCATATAGATTGGTGCATGACAATTTCC |
| | | CCAAATTCTTATCCAATCTGGAAGTTTATGATAAGATCAAGGCCACTTGT |
| | | CCTGAGGTCATCCAACAGGCATCAGAGGAAATACAGCCTTTCTTGGAGG |
| | | GTGTGATGATTGATGATATCTTCTCGCTTGATTTTTATAACTCTCTGCTA |
| | | ACACAGGATGGCATTGACTTCTTTAACCGTGTGATTGGTGGTGTGAGCGA |
| | | AGAGGATAAGCAGAAATATCGTGGCATCAACGAGTTCTCTAACCTCTAT |
| | | CGCCAGCAGCATAAGGAACTGGCTGGTTCCAAGAAGGCCTTGACGATGA |
| | | TTCCATTGTTTAAGCAGATCTTGTCTGATCGTGACACCTTGTCATATATC |
| | | CCTGCTCAGATAGAAACGGAAAATGAACTCATGACCTCTATAAGCCAAT |
| | | TCTATAAGCACATCACCTATTTCGAGCGTGATGGAAAAACCATCAACGT |
| | | ACTAAATGAATTGGTGGCTCTGCTAAGCAAGATTGATACTTATAATCCA |
| | | GATGGTATTTGTGTTACAGCTAACAAACTGACTGATATCTCGCAGAAGG |
| | | TATTCGGCAAGTGGAGTATCATCGAAGAGAATCTGAAGGAAAAGGCTGT |
| | | CCAGCAATTTTGCGACATCTCTGTAGCCAAGAATAAGAAAAAGGTGGATG |
| | | CCTATCTTTCGCGTAAGGCTTATTGTCTTTCTGACTTGTGCTTTGATGAC |
| | | GAGTTCCATATTTCCCAATATTTTTCAGATCTTCCTCAAACGCTCAATGC |
| | | CATTGAAGGCTATTGGCTGCAGTTTAATGAATGGTGCAAAAACGATGAA |
| | | AAGCAGAAGTTCCTGAATAATCCAGCGGGTACGGAAGTIGTGAAGAGC |
| | | CTCCTGGATGCCATGATGGAACTCTCTCACAAATGTTCCGTTCTGGTGAT |
| | | GCCAGAAGAGTATGAGGTGGACAAGAGTTTCTATAATGAGTTCATCCCC |
| | | CTTTATGAGGAACTTGACACGCTCTTCCTTTTATATAATAAGGTAAGGAA |
| | | CTACCTTACTCGGAAGCCTTCTGATGTCAAGAAGTTCAAACTCAACTTTG |
| | | AAACTCCATCATTAGCTGACGGATGGGATCAGAACAAGGAAAGAGCTA |
| | | ACAAGGCTATTCTGCTTTTCAAAGACGGGTTATCCTATTTGGGAATCATG |
| | | AATGCCCAGAACATGCCAAACCTGAATCAAAAATGGTCAGCGGATGAA |
| | | AGCCATTATAGTAAGATGGTTTACAAACTGATACCTGGTCCTAACAAGA |
| | | TGTTGCCAAAGGTGTTCTTCTCCAAGAAAGGACTCGACATATTCAATCC |
| | | GTCCAGACATATCTTGAGAATCAAGGAGGAAGAGACCTTCAAGAAAGG |
| | | CTCTCCCAATTTCAAACTTGCTGACCTGCATGACCTGATTGATTTCTATA |
| | | AAGATGGGATTAACCGTCATCCGGACTGGAGCAAGTTCAATTTCCAGTT |
| | | TGCTGATACTAAGGCGTATGAGGATATTGCAGGTTTCTATCGTGATATA |
| | | GCTAATCAGGCATACAAGATTACATTCTCGGATATCCCTGTCTGGCAAA |
| | | TCAACGACTGGATTGATAATGGCCAGTTATATCTGTTCCAACTCTATAAT |
| | | AAGGACTATGCTGAGGGCGCTCACGGACGAAAGAATCTTCATACACTCT |
| | | ATTGGGAAAATCTATTCACAGACGAGAATCTCAGCAACCTGGTGCTGAA |
| | | ACTAAATGGCCAGGCGGAGTTGTTCTGTCGCCCTCAAAGCATTAAGAAA |
| | | CCCGTATCGCATAAGATGGGCTCGAAGATGCTCAATCGTAGGGACAAGA |
| | | GTGGAATGCCGATACCAGAATCCATCTATCGCAGCCTGTATCAGTTCTAT |
| | | AATGGCAAGAAGAAAGAAAGCGAACTGACAGCTGCAGAAAAGCAGTAT |
| | | ATGGATCAAGTCATCGTGAAGGATGTCACCCACGAGATTATCAAAGATC |
| | | GCAGATATACCAGACAGGAATACTTCTTCCATGTACCTCTTACATTCAAT |
| | | GCGAATGCAGAAGGTAATGAGTATATCAATGAGAATGTGCTGAATTATC |
| | | TGAAAGACAATCCTGATGTGAATATCATTGGTATCGATCGTGGTGAGCG |
| | | TCATCTCATCTATCTCACACTGATTAATCAGCGTGGAGAAATCTTAATGC |
| | | AGAAGACGTTCAACGTAGTGAATAGCTACAATTACCAGGCAAAGTTGGA |
| | | GCAGCGCGAAAAAGAACGTGACGAGGCCCGTAAGAGTTGGGATAGTGT |
| | | AGGTAAAATCAAAGACCTGAAAGAAGGTTTCCTTTCTGCTGTTATCCAC |
| | | GAGATTTGCAAGATGATGATCGAAAACAATGCCATCGTGGTATTGGAGG |
| | | ATTTGAACTTTGGATTCAAACGCGGTCGTTTCAAGGTAGAGCGTCAGGT |
| | | CTATCAGAAGTTCGAAAAGATGCTGATTGATAAACTGAACTATCTTTCCT |
| | | TTAAGGATCGTGAGGCCGAAGAGGATGGTGGTATACTCAGAGGCTATCA |
| | | GATGGCACAGAAGTTTGTCAGCTTCCAGAGACTTGGTAAGCAGAGCGGC |
| | | TTCTTGTTCTATATCCCTGCTGCCTATACCTCAAAGATAGATCCCATAAC |
| | | TGGTTTTGTGAATCATTTCAACTTTAACGATATCACAAATGCTGAGAAGC |
| | | GAAAAGAATTCCTGATGAAGATGGAACGCATTGAGATGAGAAATGGAA |
| | | ATATCGAGTTTGAATTCGACTATCGTAAGTTTAAGACTTTCCAGACGGAC |
| | | TATCAAAACCTTTGGACGGTCAGTACCTATGGTAAGCGAATCGTGATGC |
| | | GAATAGACGATAAAGGATATAAACAGATGGTTGACTACGAGCCAACAA |
| | | AGGATATTGTCAATACCTTTAAGAACAAAGGCATACAACTGACAGAAGG |
| | | TTCTGATCTTAAAGCCCTGATTGCTGATATTGAGGCTAATGCTACCAATG |
| | | CTGGCTTTTTCAACACCTTGCTTTATGCATTCCAGAAGACCTTGCAGATG |
| | | CGTAATAGCAATGCTGCAACGGAAGAAGATTTTATTTTCTCGCCAGTAG |
| | | CCAGAGACGGGCGCTACTTCTGCAGTATGGATGAGGCTAACAAGGGCA |
| | | GAGATGCACAAGGCAACTGGGTATCAAAGCTTCCTATTGATGCAGATGC |
| | | GAATGGTGCCTATCATATTGCTTTGAAGGGACTATACTTGCTCAGAAATC |
| | | CAGAAACGAAGAAAATAGAAAACGAAAAATGGCTCCAATTTATGGTAG |
| | | AGAAACCGTATTTGGAGTAA |
| 433 | 402 | ATGCTCAATTTGAATTATTATCTATTTTATTTTGTATCTTTGTGGCAAGA |
| | | TAATGAATATTTAAAACCTATTACAATGAACAACTTAAAACAATTTATCG |
| | | GCATATATCCTGTTTCAAAGACCTTGCGCTTTGAGTTGAGACCTATTGGT |
| | | AAGACACAAGAATGGATAGAAATTAATAAGGTTTTAGAAGGTGATGTA |
| | | CAGAAAGCCGCAGATTATCCTACGGTCAAGAAGCTTATTGATGAGTACC |
| | | ATAAAATTTGTATTCATGACTCTTTAAAAAACGTTCACTTTGATTGGGCT |
| | | CCTTTGAAAGAAGCTATTGTCATTTTTCAAAAGACCAAGAGTGACGAGT |
| | | CCAAGAAACGACTTGAGGCAGAGCAGACCATCATGCGTAAACAGATTG |
| | | CTGCTGCAATCAAGGATTTCAAGCATTTCAAGGAGTTAACAGCTGCAAC |
| | | CCCCAGCGATTTGATTACCTCAGTCCTTCCTGAATTCAGCGATGATGACT |
| | | CATTGATGTCTTTCCGTGGCTTTGCTACCTATTTCAGCGGGTTTCAAGAG |
| | | AACAGAATTAATATCTATAGTCAGGAATCCATCAGTACGGGAGTTCCTT |
| | | ATAGAATAGTACATGATAACTTTCCTAAGTTCCTTTCTAACCAGGAGGTC |
| | | TATGACAGAATCAGGTCTGTATGCCCAGAAGTTATCAAGCAGGCATCAG |
| | | AAGAGTTACAGCCTTTTTTAGAAGGGGTAATGATCGACGATATATTTTC |
| | | ACTTGATTTCTATAATTCTCTATTGACTCAGGACGGAATAGATTTCTATA |
| | | ACCGTGTAATTGGTGGTGTGAGCGAAGAAGGTAAACAGAAATATCGTG |
| | | GAATCAACGAGTTCTCAAATCTCTATCGTCAACAGCACAAAGATCTTGC |
| | | AGCCTCCAAGAAGGCTATGACGATGATACCTCTTTTCAAACAGATTTTGT |
| | | CTGATCGTGAAACTTTGTCATACATTCCTGTACAGATAGAATCAGAAGA |
| | | TGAGCTAGTATCTTCTATCAAACAATTCTATGAGCATATTACCCACTTCG |
| | | AGCGGGATGGAAAAACGGTCAATGTGCTATCAGAATTGGTGGCTGTGCT |
| | | GGGGAATATAGACTCATATAATCCTGATGGTATATGTATATCAGCCAGC |
| | | AAACTGACAGACATATCTCAGAAGGTATATGGCAAGTGGAGCATTATCG |
| | | AAGAGAAACTGAAAGAAAAGGCTATCATGCAGTATGGTGACATCTCTGT |
| | | AGCCAAGAATAAGAAGAAAGTAGATGCATATCTTTCACGTAAAGCCTATT |
| | | GCTTGTCTGATTTGTGTTTTGACGAGGTTGTCAGTTTCTCACGCTATTAC |
| | | TCTGAATTACCACAAATGCTCAATGCTATTAATGGCTATTGGATGCAGTT |
| | | TAACGAATGGTGTAGGAGTGATGAAAAACAGAAGTTCCTTAATAACCCA |
| | | ATGGGTACTGAAGTGGTGAAGTGTCTGTTAGATGCAATGATGGAGCTAT |
| | | ACCATAAGAGCGCAGTCTTGGTAATGCCAGAAGAGTACGAGGTTGACA |
| | | AGAGTTTCTATAACGAATTCATACCCCTCTATGAGGAACTTGATACACTC |
| | | TTCCTGTTATATAATAAGGTAAGGAATTACCTCACTCGAAAACCATCTG |
| | | ACGTTAAGAAGTTTAAACTAAATTTTGAGTCGCCTTCATTGGCAAGTGG |
| | | ATGGGACCAGAATAAGGAAATGAAGAATAACGCGATTCTTCTTTTCAAG |
| | | GATGGTAAATCGTATTTAGGTGTTTTAAATGCCAAGAACAAAGCAAAGA |
| | | TAAAAGATGCCAAGGGCGATGCGTCATCTTCTTCATATAAAAAAATGAT |
| | | TTACAAACTTCTGTCTGATCCGTCAAAGGATCTGCCCCATAAGTTATTCG |
| | | CTAAGGGTAATCTTGATTTCTACAAGCCATCAGAGTATATCTTAGAAGG |
| | | AAGGGAATTGGGTAAATACAAGAAAGGACCAAATTTTGACAAGAAGTT |
| | | CCTTCATGACTTTATAGATTTCTACAAGGCGGCAATTGCTATTGATCCTG |
| | | ATTGGAGCAAGTTCAACTTCCAGTATTCTCCAACGGAGTCGTATGAGGA |
| | | TATTGGTGCCTTCTTTAGTGAAATCAAGAAGCAGGCTTACAAGATTCGTT |
| | | TTACTGATATAACAGAGTCTCAGGTGAACGAGTGGGTTGATAATGGTCA |
| | | GTTGTATCTGTTCCAGCTGTATAATAAGGATTATGCAGAAGGGGCTCAT |
| | | GGACGAAAGAATCTGCATACACTCTATTGGGAGAATCTTTTTACTGATG |
| | | AGAATTTGAGTAATCTGGTTCTGAAACTAAATGGTCAGGCAGAATTGTT |
| | | CTGCCGTCCTCAGAGTATCAAGAAGCCTGTGTCGCATAAGATTGGTTCG |
| | | AAGATGCTGAATCGTAGGGATAAGAGCGGTATGCCCATACCAGAAAAT |
| | | ATCTATCGCAGTTTGTATCAGTTCTATAATGGTAAGAAGAAAGAGAGTG |
| | | AGCTAACAACTGCAGAAAAGCAGTATATGGATCAGGTGATAGTGAAGG |
| | | ATGTTACCCACGAAATCATTAAAGACCGCAGATACACCAGGCAAGAATA |
| | | CTTCTTCCATGTACCTCTGACGTTAAATGCCAATGCTGATGGTAATGAGT |
| | | ATATTAATGAGCAAGTGCTGAACTATCTGAAGTATAATCCTGACGTGAA |
| | | TATCATAGGTATTGACCGTGGTGAACGTCATCTGATTTACCTCACATTGA |
| | | TTAATCAGCGTGGAGAAATCATAAAGCAGAAGACTTTTAACATTGTGAA |
| | | TAATTACAACTATCAGGTCAAGTTGGAACAGCGAGAAAAAGAACGCGA |
| | | CGAGGCTCGTAAAAGTTGGGATAGTGTTGGTAAAATAAAGGATTTGAAA |
| | | GAAGGCTTTCTTTCTGCCGTTATCCATGAGATAACTAAGATGATGATTGA |
| | | AAACAATGCCATCGTGGTTCTTGAGGATTTGAACTTTGGTTTCAAACGTG |
| | | GTCGTTTTAAAGTGGAGCGTCAGGTATATCAGAAGTTCGAGAAAATGCT |
| | | GATAGATAAGCTGAATTATCTGTCATTTAAGGATCGTGAGGTAGGCGAA |
| | | GAAGGAGGTATACTTAGAGGTTACCAGATGGCACAGAAGTTTGTTAGTT |
| | | TCCAGAGATTAGGTAAACAGAGTGGTTTCTTGTTCTATATTCCTGCAGCT |
| | | TATACCTCCAAGATAGACCCTGTGACAGGCTTTGTAAATCATTTCAACTT |
| | | CAACGATATCACCAATGCAGAAAAGCGAAAAGACTTCTTGATGAAGAT |
| | | GGAGCGCATTGAGATGAAGAATGGATATATAGAATTTACATTCGACTAT |
| | | CGTAAGTTTAAGACTTACCAGACAGACTATCAAAACGTTTGGACCGTAA |
| | | GTACTTTCGGAAAACGAATTGTGATGCGAATAGACGAAAAAGGATATA |
| | | AAAAGATGGTGGATTACGAACCAACAAACGATATTATTTATGCCTTTAA |
| | | GAACAAAGGCATCCTGTTGTCTGAGGGTTCTGATTTAAAGGCGCTCATT |
| | | GCAGATGTTGAGGCCAATGCTACTAATGCAGGCTTCTTTGGCACGCTGC |
| | | TCTATGCATTCCAAAAGACTCTACAGATGCGTAACAGCAATGCTTTAAC |
| | | GGAAGAAGATTTCATCCTTTCACCTGTAGCAAAAGATGGGCATCACTTC |
| | | TGCAGCACTGATGAGGCAAACAAAGGCAGAGATGCGCAGGGCAACTGG |
| | | GTATCAAGGCTACCTGTAGATGCAGATGCAAATGGCGCATATCACATCG |
| | | CTTTGAAGGGACTTTATCTGCTCCGAAACCCTGAAACGAAGAAAATAGA |
| | | AAACGAAAAATGGTTCCAGTTTATGGTTGAGAAACCATATTTGGAGTAA |
| 434 | 403 | ATGAAGGATTTAAAACAATTTATCGGCATATATCCAGTCTCAAAAACAT |
| | | TACGTTTTGAGTTGAAGCCAATTGGTAAAACACTTGAATGGATAAAGAA |
| | | GAACAAAGTTCTTGAAAGTGATGAGCAAAAAGCTGAGGACTATCCAAA |
| | | AGTGAAGACATTGATTGATGAATATCACAAAGTCTGCATTTGTGAGTCT |
| | | TTGAAAGGAGTCAATTTTGACTGGAATCCACTTAGATTGGCTTTGAAAG |
| | | AATACCAAAGTAGCAAGAGTGATGAGAGCAAAGCCGTTTTGGAGAAAG |
| | | AACAAGCATTAATGCGTAAACAGATTGCCACAGTCATCAAGGACTTTCG |
| | | ACACTATAAGGAACTTACTACCCCCACACCACAGAAACTTATTGATAAT |
| | | GTTTTCCCTAGCATTTATGAGAGTGATGCCTTGAAGTCATTCAACAGATT |
| | | TGCCGTTTATTTCAAAGGTTTCCAAGAGAATCGTAACAACATTTATAGCT |
| | | CAGATGCTATTAGTACTGGTGTACCTTATAGACTTGTTCACGACAATTTT |
| | | CCAAAGTTTTTGGCAGACATTGAAGTCTTTGAGAATATCAAGACGAACT |
| | | GCCCTGAGGTCATAGAACAGGCAGCAACAGAATTACAGCCATTCCTTGA |
| | | AGGAGTAATGATTGAGGATATTTTTACGATTGATTTCTACAACTCCCTTC |
| | | TAACTCAAGATGGTATAGATTTCTTTAATCAAGTATTGGGTGGAGTAGC |
| | | AGAAGAAGGCAAGCAAAAGTATCGCGGCATCAACGAGTTCTCCAATTTG |
| | | TATCGTCAACAACATCCTGAGCAAACAGCAAAGAAGAAAACCCTCACC |
| | | ATGATTCCGCTTTTCAAGCAGATACTTTCAGATAGGGATACGCTTTCTTA |
| | | CATTCCACAGCAGATAGAGTCAGAACAACAATTGATAGAACTATTAAAC |
| | | CAGTTCTATTCTCACATCACGGCCTTTGACTATAATGGCAAGACTGTTGA |
| | | TGTTCTTAAAGAATTGACCAAATTAACTGGCAATATCAACAAATACAAC |
| | | CCTGATGGCATATATCTTTCTGCCAAGTCATTGACAGACGTTTCGCAAAA |
| | | GTTGTTTAGTAAATGGAACGTCATTACAGAAAGGCTTTCTGAAGAGGCA |
| | | ATAAAAAGATTTGGGGATGTATCGATAACTAAAAATAAAAAGAAGATT |
| | | GACGCTTATCTGTCGAAAGATGCTTATGCGCTTTCAGAAATACCCCTCGA |
| | | CAATGACCATTCATTGTCAATGTTCTTTGCAGAGTTTCCCAAAACCATAG |
| | | AAAATGTTGGCAGCAACTGGCTACAATTTATGGAATGGTGCAAAGGAGA |
| | | GAGTAAGCAACTCTTCCTCAATAATGCTGATGGTACAGAAATCGTTAAG |
| | | AACTTCCTTGATTCTATTATGGAAATCCTACATAGATGTTCTGTGCTTGT |
| | | GGTTTCTGTAGAGCATGATTTAGACAAAGATTTCTATAATGATTTCTTGC |
| | | CACTTTATGCAGAATTAGAGAATGCAGTAATGGTTTATAATCGTGTACG |
| | | CAATTTCCTGACGAAGAAGCCTTCTGATACAAAGAAATTTAAATTGAAT |
| | | TTTGGTGTACCTTCGTTAGGAGATGGTTGGGACCAGAATAAAGAGCGAG |
| | | ACAACAAGGCCATTATTCTTTTCAAAGATGGTAAATCTTATTTGGGCATC |
| | | ATGAACGCAAAGGATATGCCTATAATAAAAGAAAGAGATGAAAGCACT |
| | | CCATCATCTTATAAGAAGATGATATACAAATTGCTCGCTGACCCTGCCA |
| | | AGGATTTTCCGCATACATTCTTTTCGAAAAAAGGAATAGACACATATCA |
| | | TCCTTCAAGATATATTCTTGACGGACGTGAGCAAGGAAAATATAAGAAG |
| | | GGGGAAACTTTCGATAAAAAGTTCATGCGGGATTTTATTGATTTCTATAA |
| | | GGATGCTGTGGCGAAGCACCCTATTTGGAGTAAATTCAATTTCGTCTATT |
| | | CTCCTACTGAGTCATACGAAGATATAGGTGCTTTCTTCAATGAGGTGTCT |
| | | AAGCAAGCATACAAGATTCGCTTCTCTTATATTGAAGAATCGCAAATCA |
| | | ATGAATGGACAGAGAAAGGCCAACTTTATCTTTTCCAGTTATATAACAA |
| | | GGACTATGCCGAAGGTGCTCACGGACGAAAGAACCTTCATACCCTGTAT |
| | | TGGGAAAGTTTATTCTCTCCTGAAAATCTCAGCAACATTGTGCTGAAACT |
| | | GAACGGGCAGGCAGAATTGTTCTATCGTCCACAAAGTATCAAGCAACCA |
| | | TTTTCACATAAAACGGGGAGCAAGATGCTTAATCGCAGGGACAAGAGTG |
| | | GTATGCCCATCCCTGAAGCAATCTACAGAAGTCTGTACCAATATTTTAAT |
| | | GGCAGAAAGGCTGAAAGCGAATTGACTCTTGTCGAAAAGTCCTATATTG |
| | | ACCAAGTGGTTGTTAAAGATGTGACTCATGAGATAGTAAAGGACAGGA |
| | | GATACACCAAGCCTGAATTTTTCTTCCACGTTCCTATCACATTCAATGTC |
| | | AATGCAGATGGAAACGAATATATCAATGAGCAGGTGATGGAATATCTCA |
| | | AGGATAATCCAGACGTTAACATCATCGGAATAGACAGGGGTGAACGCC |
| | | ACCTAATATATCTTACACTAATTAACCAACGAGGTGAGATATTGAAGCA |
| | | AAAGACATTCAATATAGTTGGCAACTATAACTATCATGCCAAACTGGAA |
| | | CAGCGCGAACAGGAGCGTGATCAAGCTCGTAAGAGTTGGCAAAGCGTT |
| | | GGGAAAATCAAAGAACTGAAGGAAGGTTTCCTTTCTGCTGTCATCCATG |
| | | AGATAGCCATGATGATGATAAAATACAATGCCATTGTAGTGCTTGAGGA |
| | | CTTGAATTTCGGATTTAAGCGTGGACGTTTCAAAGTGGAACGACAAGTG |
| | | TATCAGAAGTTTGAGAAAATGCTAATTGACAAACTAAACTATCTCTCCTT |
| | | TAAAGACCGCAAACCTGATGAAGCAGGAGGCATCTTACGTGGTTATCAG |
| | | TTGACACAGCAGTTTACGAGTTTCCAAAGACTTGGAAAACAAAGTGGAT |
| | | TCCTTTTCTACATTCCTGCTGCCTACACCTCGAAGATAGACCCAGTTACA |
| | | GGCTTTGTCAACCATTTCAACTTCAATGACATCACCAATGCAGAAAAAC |
| | | GAAAGGCATTCTTCATGAAGATGGAACGAATAGAGATGCGCAATGGCG |
| | | ACATCGAGTTTGAATTCGACTATCGCAAGTACAAGACCTATCAAACAGA |
| | | CTACCAAAACATCTGGACGGTTAATAGTTCTGGCAAACGCATTGTGATG |
| | | AGGATTGATGAGAATGGGCGTAAGCAAATGACGGATTACTTCCCAACTA |
| | | AAGAAATAGTGAAAGCCTTTTCAGATAAAAACATTACACTTTGCGAGGG |
| | | TACAGACTTGAAAGCTTTGATGGCGGTGATTGATACAAGCCCCAAGAAT |
| | | GCATCATTGTATGGAACACTGTTTTATGCTTTCCAAAAGACCTTGCAGAT |
| | | GCGTAATAGTGATTCTGCAACAGAAGAAGATTACATTCTTTCACCAGTT |
| | | ACTCAGAACGGAAAGCAATTCAATACCAAAGATGAGGCTGACAAAGGA |
| | | CAAGATTCTGCTGGGAACTGGGTCTCAAAGTTCCCAGTAGATGCAGATG |
| | | CTAACGGAGCATATCATATAGCACTAAAGGGTCTCTTCTTGCTTATGAAT |
| | | CAACAGA |
| | | CAAAGAAGATAGAAAACCAAAAATGGCTCCAGTTTATGGTTCAGAAGC |
| | | CATATAAGAGCTAA |
| 435 | 404 | ATGAAAGACCTAAAACAATTTATCGGCATATATTCAGTCTCAAAGACAT |
| | | TGCGCTTTGAGTTAAGACCTATTGGCAAGACACAAGAATGGATAGAAAA |
| | | GAACAAGATACTGGAGAGTGATGAGCAGAAAGCAGAGGACTACCC |
| | | TAAAGTGAAGACCCTCATAGATGACTATCATAAGGTATGTATCCGCGAA |
| | | TCGCTGAGAGGTGTTCATTTAGACTGGAGTCCTTTGAGGCAAGCATTAG |
| | | AAGAATACCAGCAAACCAAGAGTGACGAGAGTAAGGCTGTACTGGAGA |
| | | AAGAGCAAACCTCGATGCGTAAACAGATTGCTGCTGCAATCAAGGATTT |
| | | CCGCCATTTCAGGGAACTGACTGCGCCAACACCACAGAAGTTGATTGAT |
| | | GACGTGTTTCCTGGCATCTATGAAGACGAGGCATTGAAGTCTTTCAACA |
| | | GGTTTGCTCTGTATTTCAGGGGATTCCAAGATAACAGGAACAATATCTA |
| | | TAGTGCTGAGGCCATTAGTACAGGGGTGCCCTATAGGCTTGTTCATGAC |
| | | AATTTCCCCAAGTTCTTAGCAGATATAGAAGTTTATGAAAATATCAAGG |
| | | CCACATGCCCAGAGGTCATCGAGCAAGTGGCTGTAGAAATGCAGCCATT |
| | | CCTTGAAGGTGTGATGATAGATGACATCTTCACGCTCGACTTCTACAATT |
| | | CGCTTTTAACTCAAGATGGTATTGATTTCTTTAATCAGGTATTAGGCGGC |
| | | GTAGCTGAAGAAGGGAAGCAAAAGTATCGTGGCATCAACGAATTCGTC |
| | | AACTTGTATCGACAGCAGCATCCTGAGTTGACAGGAAAGAAAAAAGCCT |
| | | TGACGATGGTACCACTATTCAAGCAAATACTGTCGGACAGGGAGACGCT |
| | | TTCGTATATTCCGCAGCAGATAGAATCAGAACAACAGTTGATAGATGTT |
| | | TTGAGTCAATTCTATGCCCACATTACCGATTATGAATATAATGGCAAGA |
| | | CCATCAACGTTCTGAAAGAACTATCCAACCTGACGAATAGGATTGGGGA |
| | | CTACAATCCCGCCGGGATTTTCCTTTCTGCAAAGACATTGACTGATGTTT |
| | | CTCAGAAGTTGTTTGGTAGATGGAGTGCCATCAACGATAAACTCTACGA |
| | | GAAGGCTGTCAGCCAGTTTGGCGACCCTGCTATTGTCAAGGACAAAAAG |
| | | AAGATAGATGCCTATCTTGCGAAAGACGCATTCGCGCTTTCGGAAATCA |
| | | ATCTTGATAGCGAACATCATTTGTCGACGTATTTCTCAGAAATGGCCCTT |
| | | GTCGTAGAACAAGTAGGTAGTAGTTGGCTACAATTTAAGGAATGGTGCA |
| | | AAGGCAGCGACAAACAGCTGTTCCTTAATAACGCAGATGGAACAGAAA |
| | | TCGTCAAGAATCTGTTGGACGCTATGATGGACATTCTGCACAGATGCGC |
| | | TGTGCTTGTTGTCCCAATAGAGTATGATTTGGACAAGGATTTTTATAATG |
| | | ACTTCCTGCCACTCTATGCTGAACTGGAAAACGTTATCTTTGTCTATAAC |
| | | AGGACAAGAAACTATCTAACCAAGAAACCTTCTGACACCAAGAAGTTCA |
| | | AACTGAACTTTGGAACGCCGACATTGGGCGATGGATGGGGAGTGAACA |
| | | ACGAAAGAAAGAACAAGGCTATTCTTTTGTTTAAAGAAGGTCTGTCCTA |
| | | CTTAGGCATTATGAATGTGAAAGGCACTCTAAAGTTTGAAGAGACCAAG |
| | | GATGCCAGTTTGCATTCATACAAGAAGATGACATGTAGGTATCTGTCAA |
| | | AACCCTTTATGGACTTGCCTCACACCTTCTTTTCAGAGAAAGGCATTAGT |
| | | ACTTTCCACCCATCAGAGCGTATCATGGATATCTATAAGAATGGTACATT |
| | | CAAGAAGGATTCGCCAAGCTATAGTATCGCAGCGCTGCACGACTTAATC |
| | | GACTTCTATAAAGACGCTATCAACAAACATGAGGATTGGGTTAAATATG |
| | | GCTTTTCATTCTCACCCACAGAGTCCTACGAAGATATCAGTTCGTTCTAT |
| | | TCTGAAATAGCCAAGCAGGCATACAAAATCAGCTTTACCAATGTCTCTG |
| | | AACAACAAGTTAATGACTGGGTAGAGAACGGACAGCTTTATCTGTTCCA |
| | | ATTATATAATAAGGATTACGCCGAGGGTGCTCATGGGCGTAAGAATCTG |
| | | CATACGCTCTATTGGGAGAATCTTTTCTCTGAAGAGAATCTCAACAACCT |
| | | TGTTCTCAAGTTGGGAGGGCAGGCAGAACTCTTCTATCGCCCTCAAAGC |
| | | ATCAATAAGCCAGCCAAGCACGTTGTTGGCAGTAAGATGCTGAATCGCA |
| | | GGGACAAGAGCGGAATGCCTATTCCAGAACCTATTTACAGAAGTCTTTA |
| | | CCAGTATTTCAACGGTAAGAAACAAGAAGATGAACTGACGGCAGCGGA |
| | | GAAAGCATACATCGACCAAGTTGTTGTTAAAGATACCAATCATGAGATT |
| | | GTCAAGGATAGAAGATACACAAAACCAGAATACTTCTTCCATGTTCCCA |
| | | TTGTATTCAATGCTAACGCTGACGGCAACGAATATATCAACGAAAGGGT |
| | | GCTTGACTATCTAAAGGATAATCCTGAAGTGAACATCATCGGCATCGAT |
| | | CGTGGTGAGCGTCATCTGATATATCTGACACTCATCAACCAACGGGGTG |
| | | AGATTTTGAAACAGAAGACCTTCAATATGGTTGGCAACTACAACTATCA |
| | | TGCCAAGTTGGAGTTGCGCGAGAAAGAACGTGATGATGCCAGGAAGAG |
| | | TTGGAAGAGTGTAGGTAAAATCAAGGAATTGAAAGAAGGTTTCCTCTCA |
| | | GCTGTTATTCACGAAATAGCTGTGATGATGGTTGAGAATAATGCCATTG |
| | | TTGTGCTCGAAGACCTAAACTTCGGCTTCAAGCGTGGTCGTTTTAAAGTG |
| | | GAGCGCCAAGTATATCAGAAGTTCGAGAAGATGCTGATTGACAAACTGA |
| | | ACTACTTGTCATTCAAAGACCGCATGGCTGATGAAGAAGGTGGCATTCT |
| | | TCGAGGCTACCAGCTGGCTCTGCAATTCACGAGTTTCCAAAGACTTGGA |
| | | AAGCAAAGCGGTTTCTTGTTCTACATTCCTGCTGCCTATACGTCGAAGAT |
| | | TGATCCTGTGACGGGTTTTGTCAACCACTTCAACCTGAACGACATCACCA |
| | | ATGCAGAAAAGCGTAAGGCATTCTTGATGAATATGGAGCGTATTGAGGT |
| | | GAAGAACGGCAATGTGGAGTTCGAGTTCGACTATCGTAAGTTCAAGACC |
| | | TACCAGACAGACTATCAGAATATATGGACGGTCAATACCTCAGGCAAGC |
| | | GCATTGTTTTTGATTCAGAAACAAGAAAGGCCAAAGACGTATACCCCAC |
| | | GCAAGAGATTATTGCTGCCTTCAAGGAAAAAGGCATCAATCTAAATGAT |
| | | GGAACGGATTTGAAACCCTTAATCGCTGATATTGAGGCCAATGCGAAGA |
| | | ATGCCTCGTTCTATTACGCTATATTTGATGCATTCAAGAGAACGTTGCAG |
| | | ATGCGTAACAGCAATGCAGCGACTGAAGAAGATTATATTTTGTCGCCTG |
| | | TTGTTTGCAACGGCAAGCAATTCTGCACCACGGACGAAGTCAATAAGGG |
| | | TAAGGATGCTGATGGAAACTGGCTATCCAAACTCCCTGTTGATGCTGAT |
| | | GCCAATGGTGCCTATCACATCGCCCTCAAGGGGCTTTACCTCTTAAAT |
| | | AACCCTCAAACAAAGAAGATAGAAAATGAAAAATGGTTCCAATTCATG |
| | | GTTGAAAAGCCCTACTTAGAGTAA |

### Group 14 Sequences (SEQ ID Nos: 436-563)

TABLE S14A
Enzyme Sequences Group 14 (SEQ ID Nos: 436-456)

| SEQ | |
|---|---|
| ID | |
| NO | Sequence |
| 436 | MNTMTQRSPVSGGKNPEGQKSVFDSFTHKYALSKTLRFELVPQGKTSESLKAVFE |
| | EDKKVEENYQKTKVRLDQLHRLFVQASFTESKVSALKLASFVRAYNALIGVAKKT |
| | QTKEQKSAYEKERKALLYEVAGLFDEMGDEWKAQYEEIESVGRTGKQKKIKFSST |
| | GCKILTDEAVLNILMDKFAEDTQVFSTFFGFFTYFGKFNETRENFYKSDGTSTAVA |
| | TRVVENLEKFLRNKHIVESEYKKVKTAIGLTDSEILALTDVEAYHRCFLQAGIDVY |
| | NTVLGGSTELEQSVNKKVNEYRQKTGNKISFLAKLHNQILSEKDVFEMLVIKGDA |
| | QLWEKLKVFSEENVAYCTKMLALIRDALTMPEKSGYEWSKIYFSSGAINTISSKYF |
| | TNWSVLKGALLDAVGTAKGGGGELPDFVSLQHVQNALDVNEINKGKKPSELFRSE |
| | ILKHAAFVESVGHFTNLITILLSELDARVAESAVDLADLKKDSFWTTGALSQRRKE |
| | KEDEGTIQINRISAYLNSCRDAHRMIKYFATENRRDWVEPEEGYDPKFYDAYREEY |
| | AKDIFFPLYNVARNFLTQKPSDENKVKLNFECGTLLSGWDKNKEQEKLGIILRKDG |
| | AYYLAIMRKQFSDILEEKKHPEAYRAGDNGYSKMEYKLFPDPKRMIPKVAFAETN |
| | KKTFGWTPEVQAIKDEYAKFQESKKEDQSAWKNQFDANKTARLIAYYQNCLAKG |
| | GYQETFGLTWKKPEEYVGIGEFNDHIAQQNYKIKFVPVDADYIDEHVAKGEMYLF |
| | KIKSKDFASGSTGTKNVHSLYFSQLFSEANLAQTPTVVQLAGNAEIFYREASVEPEK |
| | EKRNFPRDITKYKRFTEDKVFFHVPIKINAGTDAMRSQYQFNKILNAELIAKRAKDF |
| | CIIGIDRGEKHLAYYSVINQKGVIVDEGSLNEISGTDYHKLLDGKEKERTANRQAW |
| | LPVRQIKDLKRGYVSHAVKKICDLAIEHNAIIVLENLNMRFKQIRSGIEKSVYQQLE |
| | KQLVDKLGHMVFKDRPELEIGGVLNGYQLAAPFESFKDMGNQTGIVFYTEAAYTS |
| | TTDPVTGFRKNVYVSNSATKEKLEKAIKSFDAIGWNEERQSYFITYDPVRLVDKKE |
| | KTKTISKLWTVYADVPRIRRERNEQGVWNARNVNPNDMFKSLFEAWNFEDKIAT |
| | DLKSKIEEKMKNGELSSYKMIDGRERNFFQAFIYIFNIILDIRNSSDKTDFIASPVAPF |
| | FTTLNAPKPNPCDINLANGDSLGAYNIARKGIITIGRINDNPEKPDLYISKEQWDEW |
| | ATKHGIQL |
| 437 | MNKFTNLYSVDITLRNSLIPIGETLENMTQRSYIEHDEQRAEAYKLVKGIIDDYHRA |
| | FIDSRLAHFELRVNSRGAFDSIEEFATLYNIRRDKKRDKEFTTVKKNLRKAISQQLT |
| | KCDAYGRIDKRELIREDLPYFIDSLDISEDEKEEKKKQVEQFAKFATYFSNFHTNRA |
| | NMYVADEKSTSIAYRLINQNLPVFLDNMKVFAMLKAIGFEDELDAIYSDMEEKLN |
| | VQSLDELFQQDYYSMLLTQRQITVYNEVIGGRSEKDGKKVKGLNEYINSHNQDHP |
| | TARLPFLRPLYKQILSDRVSMSWLPEAFVSDEEMIHAINIFHQNIHPLLWGPMDDA |
| | GEPLKNILSQIDTFDTEHIFITNDSALTNISQRLFGQYNLITDALLKRLSQQTPRKRGR |
| | KPESDEAYEERIRKAFKAIKSFSIAEINESLKSYMEEETYKDVSSYFRAMDERNDEH |
| | VQQANIFNRIEHAYTEAKPFLNKQRASNSPYNQDDDAIKCIKALLEAYKTLQRFINP |
| | LVGSGEESSKDDMFYGEFMPIVEELKNITPLYNKVRNWLTRKPYSTEKFKICFDNS |
| | SFLSGWPQDYETKGGYIAEHNGLYYLFINEVRLNENQIGFLCDHPDEDNASRILLDF |
| | QKPDYRNIPRFFIRSKGDNFAPAVEKYGLPIASVIDIYDQGRFETEYRSINSDDYYRS |
| | LHKLIDYFKLGFTRHESYKHYTFQWKPTNEYNDISQFYHDVEVSCYQLKRIPINWN |
| | HLLELVRQGAVYLFQIYNKDFSTQSKGKGTPNLHTLYWRMLFDERNAQNLVYKL |
| | NGQAEIFFRHASIKPENKVVHKANRPIENKNPLRKPVKPNSSFPYEITKDKRYTLDH |
| | FEFHVPITMNFKSPGINNVNPIVIDKIRKGEITHVIGIDRGERHLLYLSLIDLKGKIIHQ |
| | MTLNTISNQWAEGKIDTDYQKLLGQKEGNRLEARRNWKTIENIKELKEGYLSQAI |
| | HLIAQLMVENKAIVVLEDLNFGFMRGRQKVEKQVYQQFEKMLITKLNYYVDKKK |
| | DADALGGLLHALQLTNKFESFEKLGKQSGFLFYVPAWNTSKIDPVTGFVNLLNLH |
| | YETREKASLFFSKFERISFNEEKNWFEFVLDYGKFTTKAEGTRTAWTLCTFGERIET |
| | FRDPQANHQWGNRIMNLTQAFKDFFRDSNIDIYGNLKDQICSQQKAKFFEQLLHL |
| | MKLLLQMRNSKKDSTSPEDDYILSPVADDNGVFYDSRHSSESLPNDADANGAYNI |
| | ARKGLWIIRQIQSASADERPSLTLSNKEWLHFAQTKPYLND |
| 438 | LRKILHRHSFIFVAEIIKTHIMENLKKFTNLYSKPITLRFSAEPIGNTGKNFRDNILQK |
| | DKDLDESYQEAKLIIDNYHRWHIDTVLKRTNLDENKLLEFYAIYTDKRYKDRDKL |
| | LASLQKGFRKVLSDSLLHNEKDLFGEKLITSLIPQWLELCGNKEALEVISKFNKFTT |
| | YFTGFNTNRKNIYTEEEKKNSITYRLIHENLLKFIDNINLFERIKETEVANNFDTIKNE |
| | AKLNIQLEEVFTITYFNKLLTQSGIDLFNLIIGGYSTEKRVKYKGLNEYINEYNQTH |
| | AGNQLPKFRPLFKQILSEKDSTSYIDKQFADSKDVIIAINQSYDAINTYVLPHLTQVL |
| | SLITPEKLSLIYIENGADITRISNELCGNYDFIKQHFIKEFELQRPRTSKETIEKYYEKI |
| | NKAWSKDKFVTLEYINTILRQNNKEDIISYFTKERLATTLKKIEEAYKKFQSILTVD |
| | YNGELKSDKESVSLIKDLLDSIKDLQLFIKPLSKGEFETQKDNNFYNEFIPIYSVLND |
| | NISHLYDRVRNYVTQKPYSTEKIKLNFENSTLMSGWDVNKEPDNTTIILRKDGFYY |
| | IGIMDKKSNKCFSSKNLPSEGECYEKMEYKLLPGANKMLPKVFFSKSRIEEFAPNPQ |
| | LLRAYEKGTHKKGVGFRIEDCRNLIDFFKISIEKHNDWKQFNFRFSPTNSYQDISDF |
| | YREVEHQGYKITFRNISQSYIDALVAEGKLYLFRLYNKDFSQYSKGQPNLHTMYW |
| | KMLFDEDNLANVMYALNGGAELFFRPASLERKITHPANEPIACKSVENKGKASTF |
| | KYDLIKDKRYTQDTFQFHVPITLNFKGRGINTPKGFNEHINKYYLPHATHIIGIDRGE |
| | RNLLYISVIDMNGRIVEQFSLNDIVNEYNGKQYHTDYHHKLDDREKARAKARESW |
| | QSIENVKELKEGYLSQVVHKIVQLVLKYNAIIVMEDLEKAFKNNRLKIEKSVYQKF |
| | EDALINKLSYIVDKTAGKENVCGLLNALQLAYIPQKKNDIINQCGIIFYIPAWCTSKI |
| | DPVTGFINKIDTRYTSIEKAKELIGKFADICYDDENECFEFKIEDYTKLGGIDDTRKD |
| | WVLTSRGMRIETVLNPTTQKYSEQVEINLTDEFMKLLQGGIGTNLKDYILHQDNSK |
| | FFKDLLRCIKLMLQMRNSKIGTDIDYLISPVKQDNGEFYSSKEEKQKGTDSCGQWK |
| | STLPIDADANGAYNIARKGLMVANKLKSGSIPKEAFAVSNKDWLNFVQQNNV |
| 439 | MFEKLSNIVSISKTIRFKLIPVGKTLENIEKLGKLEKDFERSDFYPILKNISDDYYRQY |
| | IKEKLSDLNLDWQKLYDAHELLDSSKKESQKNLEMIQAQYRKVLFNILSGELDKS |
| | GEKNSKDLIKNNKALYGKLFKKQFILEVLPDFVNNNDSYSEEDLEGLNLYSKFTTR |
| | LKNFWETRKNVFTDKDIVTAIPFRAVNENFGFYYDNIKIFNKNIEYLENKIPNLENE |
| | LKEADILDDNRSVKDYFTPNGFNYVITQDGIDVYQAIRGGFTKENGEKVQGINEIL |
| | NLTQQQLRRKPETKNVKLGVLTKLRKQILEYSESTSFLIDQIEDDNDLVDRINKFNV |
| | SFFESTEVSPSLFEQIERLYNALKSIKKEEVYIDARNTQKFSQMLFGQWDVIRRGYT |
| | VKITEGSKEEKKKYKEYLELDETSKAKRYLNIREIEELVNLVEGFEEVDVFSVLLEK |
| | FKMNNIERSEFEAPIYGSPIKLEAIKEYLEKHLEEYHKWKLLLIGNDDLDTDETFYP |
| | LLNEVISDYYIIPLYNLTRNYLTRKHSDKDKIKVNFDFPTLADGWSESKISDNRSIIL |
| | RKDGYYYLGILEDNKLFNNIKSNSLKNYYEIMRYNLFPDAAKMIPKCSISKKEVKN |
| | HFENGVDKSIYLDNQFVSPLEISKELYELQNNLVDGKKKYQIDYLRNTDDEVGYK |
| | NALVQWITFCKDFLLKYQGTQDFDYSELKEAKYYDKLDQFYADVDSCGYNLDFD |
| | NIDEDLVNKAVEDGKLLIFQIYNKDFSPESKGKKNLHTLYWLSMFSEENLRTRKLK |
| | LNGQAEIFYRKKLEKKPIIHKEGSILLNKIDKEGNTIPENIYHECYRYLNKKIGREDL |
| | SDEAIALFNKDVLKYKEARFDIIKDRRYSESQFFFHVPITFNWDIKTNKNVNQIVQG |
| | MIKDGEIKHIIGIDRGERHLLYYSVIDLEGNIVEQGSLNTLEQNRFDNSTVKVDYQN |
| | KLRTREEDRDRARKNWTNINKIKELKDGYLSHVVHKLSRLIIKYEAIVIMENLNQG |
| | FKRGRFKVERQVYQKFELALMNKLSALSFKEKYDEGKNLEPSGILNPIQACYPVDA |
| | YQELQGQNGIVFYLPAAYTSVIDPVTGFTNLFRLKSINSSKYEEFIKKFKNIYFDNEE |
| | EDFKFIFNYKDFAKANLVILNNIKSKDWKISTRGERISYNSKKKEYFYVQPTEFLIN |
| | KLKELNIDYENIDIIPLIDNLEEKAKRKILKALFDTFKYSVQLRNYDFENDYIISPTAD |
| | DNGNYYNSNEIDIDKTNLPNNGDANGAFNIARKGLLLKDRIVNSNESKVDLKIKNE |
| | DWINFIIS |
| 440 | LFNLYSCLTEYILMQITIFTNKNKRNKNNMENSNLFTNKYQVSKTLRFRLEPTGGT |
| | DDLLRQAQIIEGDERRNKEAITMKQILDNCHKQIIERVLSDFNFKEHSLEEFFKVYT |
| | RNDDDREKDIENLQSKMRKEIADAFTKQDVTKLFSSKFKDFVERGLIKYASNEKER |
| | NIVSRFKGFATYFTGFNTNRLNMYSEEAKSTAISFRLINQNLIKFIDNILVYKKVSQT |
| | LPSDMLSNIYIDFKAIINTSSLEEFFSINNYNNILTQKQIEIFNAVIGGKKDKDEKIITK |
| | GFNQYINEYNQTNKNIRLPKMMRLFNQILSDREGVSARPEPFNNANETISSVRDCFT |
| | NEISKQITILSETTSKIESFDIDRIYIKGGEDLRALSNSIYGYFNYIHDRIADKWKHNN |
| | PQGKKSPESYQKNLNAYLKGIKSVSLHSIANICGDNKVIEYFRNLGAENTVDFQRE |
| | NVVSLIDNKYNCASNLLSDAQITDEELRTNSRSIKDLLDAVKSAQRFFRLLCGSGNE |
| | PDKDHSFYDEYTPAFEALENSINPLYNKVRSFVTKKDFSTDKFKLNFDSSSFLSGW |
| | ATKSEYEKSSAFIFIRDNQYYLGINRCLSKEDIAYLEDSTSSSDAKRAVYLFQKVDA |
| | KNIPRIFIRSKGSNLAPAVNEFQLPIETILDIYDNKFFTTSYQKKDRTKWKESLTKLID |
| | YYKLGFSQHKSYADFDLKWKASSEYNDINDFLADVQKSCYRIEFININWDKLIEFT |
| | EDGKFYLFRIANKDLSGNSTGLPNLHTIYWKMLFDESNLKDIVYKMSGNAEVFMR |
| | YNSLKNPIVHKAGVEIKNKCPFTEKKTSIFDYDIIKDRRYTKDQLELHVPILMNFKS |
| | PSAAKGNVFNKECLEYIKNNGIKHIIGIDRGERNLLYMVITDLDGNIVEQKSLNQIA |
| | SNPKLPLFRQDYNKLLKTKADANAQARRDWETINTVKEIKFGFLSQIVHEIAMSIIK |
| | YDAIVVLENLNRGFMQKRGLENNVYQKFEQMLLDKLSYYVDKTKHPEEAGGALH |
| | AYQLSDTYANFNSLSKNAMVRQSGFVFYIPAWLTSKIDPVTGFASFLKFHRDDSM |
| | ATIKSTISKFDCFKYDKECDMFHIRIDYNKFSTSCSGGQRKWDLFTFGDRILAERNT |
| | MQNSRYVYQTVNLTSEFKNLFATKDIDFSGNLKDSICKIEDVGFFRKLSQLLSLTLQ |
| | LRNSNAETGEDFLISPVADKDGNFFDSRNCPDSLPKDADANGAYNIARKGLMLVE |
| | QLKRCKDVSKFKPAIKNEDWLDYVQR |
| 441 | LQHTKKRIVMANFENFTNLYSISKTLRFELRPDEKTQENIKKHGLLQEDTHRADSY |
| | KKVKKIIDEYHKDFIEKSLSSCVLKIESDGKKDSLQEYCELYKKKDKSDSDKKALE |
| | KIQEQLRKQIVKSFSDRDEFKKITKKELITDLISGFLDNENKRELVEEFKSFTTYFTG |
| | FNENRKNMYSNEEKSTAIAFRLIHENLPKHMDNVSIFERLKTSKVSEDFALLSKELK |
| | EELQGKSLEDFFLIESYTKLLSQSQIDNYNALIGGKSLEKNKKIKGLNEYINLYNQK |
| | QKESKDRLPKLKMLYKQILSDRGVLSWLPKTFNSDKELLEKIEECRREFTTNEDGK |
| | GSLLEKIKQLIISLDKYDSNRIYIRNDKQITNISQKVFGGYGIIYGGLRLLLKKDTPKK |
| | KNENNEKYEERLEKRIKALDSVAISTIEEGVDTLELEDRNTILDYFKQNIEILFENIEK |
| | NYSIVKDLLNVEYPKERNLRQDKVNIEKIKNYLDSLKSLQNFIKPLCGKGNEAEKD |
| | EKFYGEFTLLWDEFNKITQLYNMVRNYITQKPYSEEKIKLNFQNSTLLNGWDLNK |
| | ERDNTSVLLRKDGLYYLAIMNKDHNKVFDIKQTKEKNSGECYEKIEYKLLPGPNK |
| | MLPKVFLSTKGIAEFNPSEELLSNYQKETHKKGDNFKIEDCHALIDFFKTSIEKHKD |
| | WKQFGFVFSDTKSYENLSGFYREVEHQGYKITFRNIAVDYIDSLIEEGKIYLFQIYN |
| | KDFSPHSKGTPNLHTLYWKMLFEKENLSNVVYKLNGEAEVFFRKKSLSNNKPTHR |
| | ANEPIDHKNKRNGDYKSMFPYDLIKDKRYTIDKYQFHVPITINFKSENINYINDRVN |
| | QYIRKSKDLHIIGIDRGERHLLYISVVDLQGNIKCQKSLNIINNYDYQGKLTEREKER |
| | DEERRSWQTIEGIKDLKEGYLSQAIHEISNLILKYNAIVVLEDLNFGFMRGRQKFEH |
| | SVYQKFEKMLIDKLNYLADKKKEPEEIGGLLKAYQLTNQFKSFKELGKQSGILFYT |
| | QAWNTSKIDPVTGFVNLFDTRYSNTKNAQRFFNNFEDIRFNKDKGYFEFEFDYDKF |
| | TTKAEGTKTKWTICTFGNRIETFRNKEKNSQWDSVEIDLTQKFKDLFEEKKIDLEN |
| | LKAEIVKQDSKEFFEKLLRLFCLTLQLRNSISNTDVDYIISPVANENGVFYNSKECD |
| | ESLPQDADANGAYNIARKGIMIVERIKANKKGKKLDLAISNKDWLKFAQEKPYRK |
| 442 | MNIYENFTNMYQVNKTIRMGLKPICKTDENIAKFLEEDKERSEKYKIAKKIIDKENR |
| | AFIEDRLKDFSISGLDEYLELLKQKKDITKIQKKMRDEISKQLKGFPQFDSKYKFQYI |
| | TDKEDTEILEYFKKFTTFFTGFNSNRENVYSKEDISTSIGHRIIHENLPKFISNFRILNK |
| | AIEALGTGKINEDFKNNEINVTVEELNKIDYFNKVLTQSGIDLYNNLIGILNQNINLY |
| | NQQQKVKKNKIGKLETLHKQILSEKDKVSFIEEFAEDNQLLKCIDEYFKEKSCLINV |
| | DLKNLLENIDTYSLNGIFIKNDKSLKNISIYLYKDWGYISNLINEEYDYKHKNKVKD |
| | DKYYEKRKKAIDKIKYFSIGYIDELLKDKNVPMVECYFKEKINLVVKEFNASLNKF |
| | NEYKFTNELKTDEIAVEIIKNLCDSIKKIQGIIKPLIITGNDKDDDFYVEINYIWDELN |
| | KFDKIYNMVRNYLTKKDYIEEKIRMMFSKSSFMDGWGKDYGTKEAHIVYHDKNY |
| | YLVIVDEKLKLEDIDKLYKPGGDTVHYIYNYQSIDYRNIPRKFIYSKGNRFAPSVER |
| | YNLPIEDVIEVYNNKYYRTEYEEKNPKIYKKSLTSLIDYFKIGVNRDMDFEKFDIKL |
| | KDSNEYKNINEFYYNLETCCYKLQEEKVNFSVLEEFSYSGKIYLFKIYNKDFSKYSK |
| | GTPNLHTLYFKMLFDKENLENPIYKLSGNAEMFFRKGNLDLDKTTIHHANQPINNK |
| | NPNNRKRQSVFKYDIIKNRRYTVDKFALHMSITTNFQVYKNKNVNETVNRALKYC |
| | DDIYAIGIDRGERNLLYACVVNSRGEIVKQVPLNFVGNTDYHQLLAKREEERMNS |
| | RKNWKIIDNIKNLKEGYLSQAIHIITDFMVEYNAVLVLEDLNFRFKEKRMKFEKSV |
| | YQKFEKMLIDKLNFLVDKKLDKNANGGLFNAYQLTEKFTSFKDMKNQNGIVFYIP |
| | AWMTSKIDPVTGFTNLFYIKYESIEKAKEFFGKFKSIKFNKVDNYFEFEFDYNDFTD |
| | RAQGTRSKWTVCSFGPRIEGFRNPEKNNNWDGREIDITEEIKKLLDDYKVSLDEDI |
| | KAQIMDINTKDFFEKLIKYFKLVLQMRNSKTGTDIDYIISPVRNKQNEFFDSRKKNE |
| | KLPMDADANGAYNIARKGLMFIDIIKETEDKDLKMPKLFIKNKDWLNYVQKSDL |
| 443 | MDMKSLNSFQNQYSLSKTLRFQLIPQGKTLDNINESRILEEDQHRSESYKLVKKIID |
| | DYHKAYIEQALGSFELKIASDSKNDSLEEFYSQYIAERKEDKAKKLFEKTQDNLRK |
| | QISKKLKQGEAYKRLFGKELIQEDLLEFVATDPEADSKKRLIEEFKDFTTYFIGFHE |
| | NRKNMYAEEAQSTAIAYRIIHENLPKFIDNIRTFEELAKSSIADVLPQVYEDFKAYL |
| | KVESVKELFSLDYFNTVLTQKQLDIYNAVIGGKSLDENSRIQGLNEYINLYNQQHK |
| | DKKLPFLKPLFKQILSDRNSLSWLPEAFDNDKQVLQAVHDCYTSLLESVFHKDGLQ |
| | QLLQSLPTYNLKGIYLRNDLSMTNVSQKLLGDWGAITRAVKEKLQKENPAKKRES |
| | DEAYQERINKIFKQAGSYSLDYINQALEATDQTNIKVEDYFINMGVDNEQKEPLFQ |
| | RVAQAYNQASDLLEKEYPANKNLMQDKESIEHIKFLLDNLKAVQHFIKPLLGDGN |
| | EADKDNRFYGELTALWNELDQVTRLYNKVRNYMTRKPYSVDKIKINFKNSTLLN |
| | GWDRNKERDNTAVILRKDGKFYLAIMHKEHNKVFEKFPVGTKDSDFEKMEYKLL |
| | PGANKMLPKVFFSKSRIDEFKPSAELLQKYQMGTHKKGELFSLNDCHSLIDFFKASI |
| | EKHDDWKQFNFHFSPTSSYEDLSGFYREVEQQGYKLTFKSVDADYINKMVDEGKI |
| | FLFQIYNKDFSEHSKGTPNLHTLYWKMLFDERNLQNVVYKLNGEAEVFFRKKSLT |
| | YTRPTHPKKEPIKNKNVQNAKKESIFDYDLIKNKRFTVDSFQFHVPITMNFKSEGRS |
| | NLNERVNEFLRQNNDAHIIGIDRGERHLLYLVVIDRHGNIVEQFSLNSIINEYQGNT |
| | YATNYHDLLDKREKEREEARESWQSIENIKELKEGYLSQVVHKIADLMVKYHAIV |
| | VLEDLNMGFMRGRQKVEKQVYQKFEKMLIDKLNYLVDKKQDAETDGGLLKAYQ |
| | LTNQFESFQKLGKQSGFLFYVPAWNTSKIDPCTGFTNLLDTRYESIEKAKKFFQTFN |
| | AIRYNAAQGYFEFELDYNKFNKRADGTQTLWTLCTYGPRIETLRSTEDNNKWTSK |
| | EVDLTDELKKHFYHYGIKLDADLKEAIGQQTDKPFFTNLLHLLKLTLQMRNSKIGT |
| | EVDYLISPIRNEDGTFYDSRQGNKSLPANADANGAYNIARKGLWVINQIKQTPQDQ |
| | KPKLAITNKEWLQFAQEKPYLKD |
| 444 | MMETFSDFTNLYPLSKTLRFRLIPVGKTLRHFIDSGILEEDQHRAESYVKVKAIIDD |
| | YHRSYIESSLSAFELPVESMGKSNSLEEYYLYHNIRNKTEDIQNALSKVRNNLRKQI |
| | VAQLTKNEMFKRIDKKELIQNDLIDFVKNEPDANEKIALISEFRNFTVYFKGFHENR |
| | KNMYSDEEKSTSIAFRLIHENLPKFIDNMEVFAKIQNTSISEKFDAIQKELCPDSVAF |
| | VDMFKLGYFNRTLSQRQIDAYNTVISGRTTAEGEKIKGLNEYINLYNQQHKQEKLP |
| | KMKLLFKQILSDRESASWLPEKLENDKQVVGALVDFWNAIHDTVLAEGGLKTVIS |
| | SLVSYSLEGIFLKNDLQLTDVSQKATGSWSKIPAAIKQKLEAMNPQKKKESYEGYQ |
| | ERIDKIFKSYKSFSLAFINECLHGEYKIEDYFIKLGAINTDLLQKENHFSHILNTYTDI |
| | KEVIESYSESTDTKLIRDNGSIQKIKQFLDAVKDLQSYVKPLLGNGDETGKDERFYG |
| | DFVEYWNQLDSITPLYNMVRNYVTQKPYSIEKIKINFQNPTLLNGWDLNKETDNTS |
| | VILRRDGKYYLAIMNSKFRKVFLKYPSGSDRNCYEKMEYKLLPGANKMLPKVFFS |
| | KSRIQEFMPDERLLSNYEKGTHKKTGNCFSLTDCHALIDFFKKSLNKHEDWKNFGF |
| | KFSNTSTYTDMSGFYKEVENQGYKLSFKPVDAVYVDQLVDEGKIFLFQIYNKDFSE |
| | HSKGTPNMHTLYWKMLFDETNLGDVVYKLNGEAEVFFRKASIKVSSPTHPANVPI |
| | KKKNPKHKDEERLLKYDLIKDKRYTVDQFQFHVPITMNFKSDGNGNINQKVVEYL |
| | RSASNIHIIGIDRGERNLLYLVVIDGSGKICEQFSLNEIKVEHNGETYSTNYHDLLDI |
| | KENERKQARQSWQSIANIKELKEGYLSQVIHKISELMVKYNAIVVLEDLNTGFMRG |
| | RQKVEKQVYQKFEKMLIEKLNYLVFKKQPSDSCGGLMHAYQLTNKFEGFNKLGK |
| | QSGFLFYIPAWNTSKMDPMTGFVNLFDLKYESIDKAKSFFSKFDSIRYNVERDMFE |
| | WKFNYDEFTKKAEGTKTNWTVCSYGNRIITFRNPNKNSQWDNKEINLTENIKLLFE |
| | RFGIDLSSNLKDEIMQRTEKEFFIELISLFKLVLQMRNSWTGTDIDYLVSPVCNEKG |
| | EFFDSRNVDKALPQNADANGAYNIARKGLILLDRIKESTSDKKLNFSITNKEWLSF |
| | VQGCCKNG |
| 445 | MPNISEFSEHFQKTLTLRNELVPVGKTLENIISSNVLINDEKRSEDYKKAKEIIDSYH |
| ID419 | QEFIEKSLSSVTVDWNDLFSFLSRKEPEDYEEKQKFLEELESIQLEKRKSIVNQFEQY |
| | DFGSYTDLKGKKTKELSFESLFKSELFDFLLPNFIKNNEDKKIISSFNKFTSYFTGFY |
| | ENRKNLYTSAPLPTAVAYRIVNDNFPKFISNQKIFRVWKDNVPKFVEIAKTKLREK |
| | GISDLNLEFQFELSNFNSCLNQTGIDSYNELIGQLNFAINLECQQDKNLSELLRKKRS |
| | LKMIPLYKQILSDKDSSFCIDEFENDESAINDVISFYKKAVCENGPQRKLSELLRDLS |
| | SHDLDKIFIQGKNLNSISKNLFGGKNWSLLRDAIIAEKSKDKSYKKAIKTNPSSDDL |
| | DRILSKDEFSISYLSKVCGKDLCEEIDKFIKNQDELLIKINSQAWPSSLKNSDEKNLI |
| | KSPLDFLLNFYRFAQAFSSNNTDKDMSLYADYDVSLSLLVSVIGLYNKVRNYATK |
| | KPYSLEKIKLNFENPNLATGWSENKENDCLSVILLKNQIYYLGILNKSNKPNFSNGI |
| | SQQPSSESCYKKMRYLLFKGFNKMLPKCAFTGEVKEHFKESSEDYHLYNKDTFVY |
| | PLVINKEIFDLACSTEKVKKFQKAYEKVNYAEYRQSLIKWISFGLEFLSAYKTTSQF |
| | DLSNLRKPEEYSDLKEFYEDVDNLTYKIELVDLKEEYVDSLVENGQLFLFEIRNKD |
| | FAKKSSGTPNLHTLYFKSIFDPRNLKNCIVKLNGEAEIFYRKKSLKIDDITVHQKGS |
| | CLVNKVFFNPDSGKSEQIPDKIYNNIYAYVNGKSTTLSKEDEFFYTKATIKKATHEI |
| | VKDKRFTVDKFFFHCPITINYKSKDKPTKFNDRVLDFLRKNEDINIIGIDRGERNLIY |
| | ATVINQKGEIIDCRSFNTIKHQSSSVNYDVDYHNKLQERENNRKEEKRSWNSISKIA |
| | DLKEGYLSAVIHEIALMMVKYNAIVVMENLNQGFKRIRGGIAERSVYQKFEKMLI |
| | DKLNYFVIKNENWTNPGGVLNGYQLTNKVSTIKEIGNQCGFLFYVPAAYTSKIDPS |
| | TGFVNLLNFNKYNNSDKRRELICKFYEICYVQNENLFKFSIDYGKLCPDSKIPVKK |
| | WDIFSYGKRIVKEDLKTGYMKENPEYDPTEELKNLFTLMRVEYKKGENILETISIRD |
| | MSREFWNSLFKIFKAILQMRNSLTNSPVDRLLSPVKGKDATFFDTDKVDGTKFEKL |
| | KDADANGAYNIALKGLLILKNNDSVKTDKELKNVKKVSLEDWLKFVQISLRG |
| 446 | MKRLIDFTNIYQRSKTLRFRLEPIGKTADYIKVSQYLETDERLAKESKKVKELADEY |
| | HKEFIGDVLSSLELPLSKINELWDIYMSNDTDREIKFKKLQENLRKVIAEAFSKDKR |
| | FGSLFKKEIITDILPKFLQDKDDDIKIVNRFKGFTTYFYAFHKNRENMYVSEEKSTAI |
| | PYRIVNQNLVKYFDNYKTFKEKVMPLLKDKNIVESIERDFKDILNEKSIEDVFGLAN |
| | FTHTLCQADIEKYNTLIGGLVVKNEKKEIKGINQYINEHNQTSKKGNGIPKLKPLFN |
| | QILSDRKSLSFTLDDIKKTSEAIRTIKDEYENLRDKLATIERLIKSIKEYDLAGIYIKM |
| | GEDTSTISQHWFGAYYKIIEAIADAWERRNPKKNRESKAYSKYLSSLKSISLQEIDD |
| | LKIGEPIENYFATFGTTCSDRTSGVSSLNRIEAAYTEFVNKFPEGFEDGDDCNDAYF |
| | KANVEVVKNLLDSIKDFQRFVKPLLGNEDERDKDEAFYGEFVPTYTDMDNIITPLY |
| | NRVRNFATKKPYSTDKIKINFEKSTLLTGWANYKQYGGVLFCKNDSDFYLGIVKSS |
| | KTEIHTVDDSASDIYRIDYALIPNPGKTIPCLMFRDEVKAEKVNGRKDKRTGENLRL |
| | EEEKDKYLPAEINRIRKSRSYLKSSECYCNQDMVAYIDYYKKCCISYYDKLSFTFK |
| | DSSMYSDWNDFIADVDGQGYQLNRIPVSMQELENLVDNGNMLLFRIANKDFSPNS |
| | KGRPNLHTIYWRMLFDPANLKDVVYQLNGNAEIFFRKASITRTEPTHPANVAIKNK |
| | SEYNKQNKPYSTFKYGLIKDRRYTTDQFEFHVPITMNFKQPESSKLQDKLNKQVLD |
| | FLKQDGVRHIIGIDRGERNLLYLVMVDMEGKIKKQISLNEIAGNPKNSEFKQDFHA |
| | LLREREGDRLESRRSWNTIQSIKDLKEGYMSLVVHEIANMMLENDAIVVLENLNRS |
| | FMQKLGGREKSVYQKFEKMLIDKLGYIVDKTKDVSDNGGALHAVQLADTFENFN |
| | KTQKGAIRQCGFIFYIPAWRTSKIDPVTGFVPMLRCQYESIVASKDFFGKFDSIYYD |
| | ATGKYFVFQTDFTKFNTESKGGIQKWDICTYGDRIYTPRTKDRNNSPVSERVNLTE |
| | AMKSLFVLHNINIQGDIKAGIMQQTDKAFFESLHRLLRLTLQIRNSKKSTGENYED |
| | YIISPVMGKDGRFFDSRNADATQPKDADANGAYNIARKGLMLLRQIQAQEKQDLS |
| | NGKWLEFAQR |
| 447 | MIIYNCYIGGSFMKKIDSFTNCYSLSKTLRFKLIPIGATQSNFDLNKMLDEDKKRAE |
| | NYSKAKSIIDKYHRFFIEKALSSVTENKVFDSFLEDIRAYAELYYRSNKDDSDKASM |
| | KTLESKMRKFIALALQSDEGFKDLFGQNLIKKTLPEFLESDADKEIIAEFDGFSTYFT |
| | GFFNNRKNMYSADDQSTAISHRCINDNLPKFLDNVRTFKNSDVANILNNNLKILNE |
| | DFDGIYGTSAEDVFNVDYFPFVLSQKGIEAYNSILGGYTNSDGSKIKGLNEYIYLYN |
| | QKNGNIHRIPKMKQLFKQILSERESVSFIPEKFDSDDDVLSSINDYYLERDGGKVLSI |
| | EKTVEKIEKLFSAVTDYCTDGIFVKNAAELTAVCSGAFGYWGTVQNAWNNEYDA |
| | LNGYKETEKYIDKRKKAYKSVESFSLADIQKYADVSESSETNAEVTEWLRNEIKEK |
| | CNLAVQGYESSKDLISKPYTESKKLFNNDNAVELIKNALDSVKELENVLRLLLGTG |
| | KEESKDENFYGEFLPCYERICEVDSLYDKVRNYMTQKLYKTDKIKINFSNSHFLSG |
| | WAQTYSTKGALIVKKENNYYLVIVDKKLSNDDIVFLGTNTQLSPAERIVYDFQKPD |
| | NKNTPRLFIRSKGTSYAPAVKEYDLPISDIIEIYDNEYFKTEYRKINPKGYKEALIKLI |
| | DYFKLGFSRHESYRCFNFKWKESEQYSDISEFYNDVVKSCYQLKSESINFDSLLKL |
| | VDEGKLYLFQLYNKDFSEHSKGTPNLHTLYFKMLFDERNLENVVFKLNGEAEMFY |
| | REASISKDDMIVHPKNQPIKNKNEQNSRKQSTFKYDIVKDRRYTVDQFMLHIPITLN |
| | FTANGGTNINNEVRKALKDCDKNYVIGIDRGERNLLYICVVDSEGRIIEQYSLNEIIN |
| | EYNGNTYSTDYHALLDKKEKERLESRKAWKTVENIKELKEGYISQVVHKICELVE |
| | KYDAVIVMEDLNFGFKQGRSGKFEKSVYQKFEKMLIDKLNYFADKKKSPEEIGSV |
| | LNAYQLTNAFESFEKMGKQNGFIFYVPAYLTSKIDPTTGFADLLHPSSKQSKESMR |
| | DFVGRFDSITFNKTENYFEFELDYNKFPRCNTDYRKKWTVCTYGSRIKTFRNPEKN |
| | SEWDNKTVELTPAFMALFEKYSIDVNGDIKAQIMSVDKKDFFVELIGLLRLTLQMR |
| | NSETGKVDRDYLISPVKNSEGVFYNSDDYKGIENASLPKDADANGAYNIARKGLW |
| | IIEQIKACENDAELNKIRLAMSNAEWLEYAQKK |
| 448 | LLPARRCNGAVPHIRHTDNHATPGHSMSLDSFTRKYKLAKTLRFELRPVGRTLETF |
| | RSKFLPGDERRAAAYPGAKEMLDNEHKALLERALANPPAGLDWSGLAQAHDTYR |
| | TSDKSKAAKGALAARQAVFRKALADHLTKDPSYKTLTAATPKDLFKALKARCEE |
| | AGQPVPGDLQTFLRFSCYFKGYQENRRNIYSDKAQATAAANRAVNGNFPRFLEDV |
| | RIFRHIAERYPQIPADAARELAPLLEGRTLDSIFTPAAYNGFLAQSRIDFFNSVLGGF |
| | VPAEGEKTRGINEFVNLYRQRHEDAREDRALAPLRPLHKQILSDRESHSLVPRMFE |
| | NDGAVVSAIREMLDKRLLALETENGTENVPDALQSLLATLSPSPAIWIDGAEITRVS |
| | KDLLGSWNALSILMEAAAEIRFASESTEKKRDAAVANWMKKPVFSLAEMGGLRV |
| | DTDNGANPVDVSGLWKGPVAAARFDAVRKAVAEVRPVLDSAPSGEGTPLRERQE |
| | DIARIKAALDAILDLLRFVKPLRAGGELDRDEAFYGAFDPLFDALDGFVPLYNKVR |
| | NYLTRKPGETGSVKLMFDNPSFLEGWEQNLETKRTSILFFRDGFYYLGVMAPDAKI |
| | NFSAFAVSAASGCYRKVVYKAISKAAQYFSIKQIKPQNPPQFVLDWLAKGFDKKT |
| | LHRDQLTRLISYVMDDFIPNYPPLKDGSGRVAFDFSFRKPSEYGSWKEFTDHIASM |
| | AYKISFEDIPAEAVDRLVEEGKLCLFLLWNKDFSQASNGRPNLHTMYWKAVFSPE |
| | NLRDVVIKLNGEAEVFYRPKSIRTPFRHKVGEKMVNRRGRDGAPVPEAIHGELFRH |
| | ANGDTAPLSGAARQWLESGNLVVKEVTHEIVKDARFAADKFSFHVPVTINFKQPD |
| | VSARFNDQVRAFLRANPDVKVIGIDRGERNLLYLALVDREGNLLEQRSFNTVSRTR |
| | KDGVVTPTDYQAKLVQSEKDRAEARASWAEIGAIKDLKAGYLSAVVHEIAEMMV |
| | KHNAIVVLEDLNFGFKRGRFRIERQVYQKFEKALIDKLNYLVFKDRGMEEPGGTL |
| | RGYQLTDAFESFEKIGKQTGFLFYVPAGYTSKIDPTTGFTNLFNTKKCTNAAGIRDF |
| | FAAFDAIRWDAARRVFAFSFDYRNFKTSQESHRTKWTVYSADRRLAFDKESRSER |
| | EINPTAILLGALEERGIAVADGFDLKALLLATEPSKANAAFFRSVFYAFDRTLQMR |
| | NSRAEEDYIHSPVLNARGGFFDSREAGDALPREADANGAYHIALKGVQLLEENLA |
| | AETPNLKIEHKDWFRFAQELAERKFR |
| 449 | MNKAADNYTGSNYDEFIALSKVQKTLRNELKPTPFTAEHIKQRGIISEDEYRAQQS |
| | LELKKIADEYYRNYITHKLNDINNLDFYNLFDAIEEKYKKNDKENRDKLDLVEKSK |
| | RGEIAKMLSADDNFKSMFEAKLITKLLPDYVERNYAGEDKEKALETLTLFKGFTTY |
| | FKGYFDIRKNMFNGEGGASSICHRIINVNASIFFDNLKTFMRIQEKAGDEIALIEEEL |
| | TEKLDGWRLEHIFSRDYYNEVLAQKGIDYYNQICGDINKHMNLYCQQNKFKANIF |
| | KMMKIQKQIMGISEKAFEIPPMYQNDEEVYASFNEFISRLEEVKLTDRLRNILQNINI |
| | YNTAKIYINARYYTNVSSYVYGGWGAIDSAIERYLCNTIAGKGQSKVKKIENAKK |
| | DNKFMSVKELDSIVAEYEPDYFNAPYIDDDDNAVKAFGGQGVLGYFNKMSELLA |
| | DVSLYTIDYNSDDSLIENKESALRIKKQLDDIMSLYHWLQTFIIDEVVEKDNAFYAE |
| | LEDICCELENVVTLYDRIRNYVTKKPYSTQKFKLNFASPTLAAGWSRSKEFDNNAII |
| | LLRNNKYYIAIFNVNNKPDKQIIKGSEEQRLSTDYKKMVYNLLPGPNKMLPKVFIK |
| | SDTGKRDYNPSSYILEGYEKNRHIKSSGNFDINYCHDLIDYYKACINKHPEWKNYG |
| | FKFKETNQYNDIGQFYKDVEKQGYSISWAYISEEDINKLDEEGKIYLFEIYNKDLSA |
| | HSTGRDNLHTMYLKNIFSEDNLKNICIELNGEAELFYRKSSMKSNITHKKDTILVNK |
| | TYINETGVRVSLSDEDYMKVYNYYNNNYVIDTENDKNLIDIIEKIGHRKSKIDIVKD |
| | KRYTEDKYFLYLPITINYGIEDENVNSKIIEYIAKQDNMNVIGIDRGERNLIYISVIDN |
| | KGNIIEQKSFNLVNNYDYKNKLKNMEKTRDNARKNWQEIGKIKDVKSGYLSGVIS |
| | KIARMVIEYNAIIVMEDLNKGFKRGRFKVERQVYQKFENMLISKLNYLVFKERKA |
| | DENGGILRGYQLTYIPKSIKNVGKQCGCILYVPAAYTSKIDPATGFINIFDFKKYSGS |
| | GINAKVKDKKEFLMSMNSIRYINEGSEEYEKIGHRELFAFSFDYNNFKTYNVSSPV |
| | NEWTAYTYGERIKKLYKDGRWLRSEVLNLTENLIKLMEQYNIEYKDGHDIREDIS |
| | HMDETRNADFICSLFEELKYTVQLRNSKSEAEDENYDRLVSPILNSSNGFYDSSDY |
| | MENENNTTHTMPKDADANGAYCIALKGLYEINKIKQNWSDDKKLKESELYIGVTE |
| | WLDYIQNRRFE |
| 450 | MTSLYPTSKTIRFKLEPIGKTSENINKNGILSADECKAKDYLKIKETIDAYHKYFIDQ |
| | QLRLVKTETINKQKTGTKFFLIDGVQNVYNIYNNLKKDRKDEKNRRLFLDKCTAL |
| | RKKLVSEAFPSEVIKKLTSGKLFTDILPEWVAQENTTRSNEKKLFWSDTFKRFSTYF |
| | SGFHENRENMYSGEEKSTAIAYRLINENLPRFFDNVENFGKIQNTLKEWTSIFSDKE |
| | KQLFNEKTIKSTFVLENYANCLTQSDITCYNNLICGYTSENKEKVRGLNEFINLHNQ |
| | KIKDKKEKLRSFKLLYKQILSDRETVSFIPYQFTSINKLYDAINNFYLVCIVNEKDDG |
| | GENCNVFEAIEKHFKKIKDGNYDLKHIYISHRSVSSISQKVFGRYSFIKDALEYYYC |
| | TDIRPKYEEEIQKAKPSKREKIEKELDNYVNQQYLPIELVDKACEKYSKTLEDNFK |
| | HSESSAITDYCAHFLTKIISSKTYSAGKYEDERYSCIKGELNTQHDENYHPSTEVVN |
| | NIKLFMDTILESIHRLRDFIIRRDEENICEKDEHFYEFIDKLWEKLSAFINLYDKTRNY |
| | LTGKPYSTDKIRLTFNIPALADGWDENKEKDCRAFIFKKSEQYYLGIAAKSGLHFV |
| | YNDKEHNLSSCYWKMIYKYFPDPSKMIPKCTITTKDVKTHFASSDDNYELFDPKKF |
| | VKPIIISKDIYDIYFNAGPKPAFTGEFIKNGGDQKEYKNALTKWIDFSKQFLSSYSST |
| | AVYNFDSLRPSNSYQNISEFYSEIAALTYKINFKPILSKYIDDLVQKGDLYLFRITTK |
| | DFNSTHGMPNLHTLYWRSLFSEENLVKTCIKLNGQANIFYRVPSITSPVIHKKGSIL |
| | VGRTATNGKNIPEHIYTELCLIKNGKKAEKDADTETREYLTKIKIREAQYDIIKDRR |
| | FTQSTFLFHVPLTFNFGIKPSKTFEFNNKINDFLKKHDDVNIIGIDRGERHLLYVSVI |
| | NRQGDILEQTTLNILNGVDYHSKLDNREKERAGARKNWGTIGRIADLKEGYLSIVI |
| | HTLVEMMIRYNAIIVMEDLNTGFKRGRFKVEKQVYQKFEKALITKLNYLCLKDIAI |
| | DKIGGILHGWQLTNPFESFKKMGHQNGIIFYIPAWNTSKIDPITGFVNVIKHKYTNR |
| | ESANKFFENFKEISYKSKDDAFDFVYIDKFSGKNWIITTGGKVRYFWLKDPSGHGG |
| | STQKVDITQKLKNCFTKNNIPWENGENIVETLTTSVNASVLKEVIWCLQRVLAMR |
| | NSSAEDGVDFILSPVRMPDGRTFCSNNAGEKLPCDANGAYNIARKGILVMEKIKAG |
| | DKNPTLIKNEDWLNYAQSEVVVAMQMKKYK |
| 451 | LSQSEIDSYNSKVGNLNYLVNLYYQQTKNNLPKFKSLFKQIGCGEKKDFLKTIKDN |
| | DELNDVLTKAKNLGDKYFTGGKDKETVKAFTDYLLNLDNFENIYWSDKAINTISG |
| | KYFGNFGNLKEKLIKAKIFNEDKNSGEAKVPRAVQLSDLFEVLDGQDDWDKEGVL |
| | FRENFKDNNKAKQDIIKNAQTPHEALLKMICNDIEDLSKKFIKGADEVLKIEKGDY |
| | QKDESKIAIKAWLDDALFAGQILKYWRVKAKYSIDGNFTEILDKVKVFEVVKDYD |
| | VVRNYLTQKPQNKLGKLKLNFENSSLAAGWDINKEKDNSCVILQNEHGKQYLAI |
| | MKYEETSVFEQNKKNELYMSDNSGWKKINYKLLPGPNKMLPKVLFSSKWVTNNP |
| | TPANIKKIYGKGTFKKGDNFNKNDLHILLDFYKNQLKKYPSEKESWDKIFNFDFSN |
| | TKSYESVDRFYAEVEKQGYKLEFIPVKKNKIEELVENGKIYLFEIKSKDSNLKNGKE |
| | KTSAKDLQTIYWNRIFSDIENKPKLNGEAEIFYRPALEGKNLKRKKWKNKEIIENFR |
| | FSKEKFIFHCPITLNPCLKNKRINDLVNQVIVETKNQLFLGIDRGEKNLAYYSLVNQ |
| | RGEILEQGSFNIINKQNYWEKLDIKQGDRDLARKNWTTIGNIKDLKDGYISQVVRK |
| | IVDLAVYNEGDRKKGFRETPALIILEDLNIGFKRGRQKIEKQVYQKLELALAKKLN |
| | FLVDKSAKDGEMASVDNALQFTPPVHDFNDIKGKQFGIMFYTNPSFTSATDPITGW |
| | HKTISIKKGSEIKEQIFDLFSDFGFDGKDYYFKYKDANIGKEWILYSGKNGAELDRY |
| | RDKFSEKEGKKHWSPDRIDIVKNLENIFKGFDKNKSFKEQIKDGKELNKFDKERTA |
| | WESLRFVIDVIQQIRNTGEDEKDNDFILSPVRGASGDFFDSRKIKNGAKLPQNGDA |
| | NGAYNIARKGIIMSEHIKRNADLFVRNEEWDAWLAGEKNWVDYMANNLKIRQKT |
| | V |
| 452 | MREKKSSEKLADNFIGVYPVSKTLRFELIPQGKTLEYIQRDGILDSDHHRAENYQK |
| | VKELIDRYHKIFIDEALQSIRLENLSEYERLYSAKRDEKQDREFQEIQTSLRKQIAKK |
| | FRSHSKYKNLFNKELIKKELILFLKDEPEKRSLVEEFADFTTYFTGFNANRENMYSD |
| | EAKGTAIAYRIVHENLPKFIDNMNAFKCLKESGAFLKVKDSLPSLQKKFGLDSVEY |
| | FFTIDGFTQVLSQKGIDIYNGVLGGYICEDDTKIQGLNEIINLYNQQQKGEKNRLPK |
| | LKVLYKQILSDRESNSFVLDKFENGQEVLEAVKNCYVHFYKYIFEPEEEMSLNNLI |
| | NDLENFDLGKIYIANDVSITDISQYIYGDWSILRKAISEDYDRHHLSEKMTRDPEKY |
| | EDKKQKELKRRELYSIRELNRMAQEYAGTVCNIENYFILQISERLMKINHEYEACR |
| | SLLEGESEEKELYKDKNAVLKLKNLLDAMKELQLLIKPLIKGREKAEKDELFYVEL |
| | VRIWDELNAVNQLYNKVRNYATQKPYSLEKVKLNFNKSTLLDGWDRNKEKDNL |
| | GVILIKDNKYYLGIMNRNSNRVMEDAPAAVSTNRYQKMEYKLLPGPNKMLPKVF |
| | FSASRIDEFAPDEELLEKYKEGTHKKGDNFSLEDCHRLIDFFKRSLKKHPEWSEFDF |
| | SFSDTETYKDISGFYREVERQGYKITFKDIDADYIEKLVEEGQLYLFQIYNKDFSPYS |
| | KGTPNLHTIYWKTLFSPDNLKDVVYKLNGQAEIFYRRKSIEEKDIICHPSNEELRNK |
| | YPKAEKPTSKFPYELTKDRRFTVDKFQFHVPITMNFKAKGENYFNRKVRRLIHNCQ |
| | DMHVIGIDRGERNLLYLSVIDMQGKIKEQLPLNDIVSTNKNEVIHHKDYHLLLEKR |
| | EEENKAARQDWQTINTIKELKEGYLSQAIHIIAELMLKYNAIVVLEDLNFGFMRSR |
| | QKFEKQIYQKFERMLIDKLNYLVDKKRDINENGGALRAYQLTDKFESFQKLGKQS |
| | GFLFYVPAWNTSKIDPSSGFVNLFYTKYETKEKTRDFIKKFDSIIYNEQENYFEFYF |
| | DYSNFTYKAEGSRTKWCLCTEGNRIETFRNPAKNAEWDTKEIILTEGFAGLLEKYH |
| | ISWKSGEIKKAISEIEEAEFYRSFMHFMSLLLQMRNSDKKAGEDWLMSPVKNSRGE |
| | FFKTDKDSEDYPRDADANGAYNIAKKGLWIIEQIQKTEIDQLDKVKIAISNKEWLA |
| | YAQEHVL |
| 453 | MKNFQDFTNLYELSKTLRFELKPIGGTKKLIEEKNILKLDKKKRENYEKVKPYFNKI |
| | HQEFINFALRNPNFDFSQFEEKYLNWLKDKKNKDLLKEKESIDKIFLEKIGKLFENS |
| | VKDFLKENGFESIVKEEDQNLKFFRRKEIFEVLQEKYGSELETQMVNKDGEIKSIFN |
| | GWEKWLGYFDKFFNTRDNFYKTDGTSTAIATRIIKDNLKIFLENIVAFGKIKNKKID |
| | FSEVEKNFSVSIDTFFEINNFNNCFLQDGIDFYNKVIGGETLENGEKLKGLNEIINKY |
| | RQDTGEKIPYFKKLQKQILSEKDGVFIDKIEDDGGFYEVLKNFYKNAAEKEGFLKN |
| | IFENFYTISDKNLEKIYFNKIAFNTISHKFGSALEFERILYEEMKKEKADGIKFEKKE |
| | NKYKFPDFIQIIFIKRSLENYDSENLFWKERYYKSEENVDGFLEKNNNNLWGQFCKI |
| | LNFEFLNILKRRIIDEAGEEYEVGFEISKNILGEKLENFELNQENKGIIKDFADYSLAL |
| | YSFGKYFAVEKGRNWDLNIDISDDFYGGEDGYIEKFYNTGYDEIVKPYNLMRNYIS |
| | KKPWEDNKKWKINFETSSLLSGWDKNLESNGSYIFQKGNKYYLGIINGSKPAKEIL |
| | EKLYSGDGEKIKRFIYDFQKPDNKNTPRMFIRSKKDSFSPAVEKYNLPINDILEIYDN |
| | GLFKTENKGNPNYKESLRKLIDYFKLGFSRHESFKHFNFVWKDSKSYENIADFYRD |
| | VEKSCYKIDFEFLNFEELKKLTFEKHLYLFQIYNKDFELDESLQEKGYNFKGEGQK |
| | NIHTKYFEALFLEENISRKSGAVFKLSGGGEVFFRKKSIKAKKEKRNSVEVIKNKRY |
| | TECKYFLHFPIQVNFKEEISGNFNQEINKFLANNPDINVIGIDRGEKHLAYFSVINQK |
| | GEILESGSFNKIENYNKNGEKLLFPEREIKEIHKDGSLIDLELVETGRKVDYVDYKL |
| | LLEYKERKRLLQRQSWKEVEQIKDLKKGYISALVRKIADLIIKHNAIVIFEDLNFRF |
| | KQIRGGIEKSIYQQLEKALIDKLNFLVNKNEINLEKAGSILKAYQLTVPVDSLKEIGK |
| | QTGVIFYTEAAYTSKIDPITGWRPNLYLKKNNSKINKENILKFDNIVENSKENRFEFT |
| | YDLKKFFGKDSKFPAKTVNTVCSCVERFKWNRNLNNNKGGYIHYENLTDGKLAN |
| | KEQKEDEFSNFKELFEKYFIDINGNILEQIKNLDTKNNEKFFSSFIDLFTLVCQIRNTN |
| | QNAKGDENDFILSPVEPFFDSRKSQNFGKSLPKNGDENGAFNIARKGLIILNRISENP |
| | EKPDLLIFNADWDNFARNI |
| 454 | MLFQDFTHLYPLSKTVRFELKPIGKTLEHIHAKNFLSQDKTMADMYQKVKAILDD |
| | YHRDFIADMMGEVKLTKLAEFCDVYLKFRKNPKDDGLQKQLKDLQAVLRKEIVK |
| | PIGNGGKYKVGYDRLFGAKLFKDGKELGDLAKFVIAQESESSPKLPQIAHFEKFST |
| | YFTGFHDNRKNMYSSDDKHTAIAYRLIHENLPRFIDNLQILATIKQKHSALYDQIAS |
| | ELTASGLDVSLASHLGGYHKLLTQEGITAYNRIIGEVNSYTNKHNQICHKSERIAKL |
| | RPLHKQILSDGMGVSFLPSKFADDSEMCQAVNEFYRHYADVFAKVQSLFDRFDDY |
| | QKDGIYVEHKNLNELSKRAFGDFGFLKRFLEEYYADVIDPEFNEKFAKTEPDSDEQ |
| | KKLAGEKDKFVKGVHSLASLEQVIEYYTAGYDDESVQADKLGQYFKHRLAGVDN |
| | PIQKIHNSHSTIKGFLERERPAGERALPKIKSDKSPEMTQLRQLKELLDNALNVVHF |
| | AKLVSTETVLDTRSDKFYGEFRPLYVELAKITTLYNKVRDYLSQKPFSTEKYKLNF |
| | GNPTLLNGWDLNKEKDNFGVILQKDGCYYLALLDKAHKKVFDNAPNTGKSVYQ |
| | KMVYKQIANARRDLACLLIINGKVVRKTKGLDDLREKYLPYDIYKIYQSESYKVLS |
| | PNFNHQDLVKYIDYNKILASGYFEYFDFRFKESSEYKSYKEFLDDVDNCGYKISFC |
| | NINADYIDELVEQGQLYLFQIYNKDFSPKAHGKPNLHTLYFKALFSEDNLANPIYK |
| | LNGEAQIFYRKASLDMNETTIHRAGEVLENKNPDNPKQRQFVYDIIKDKRYTQDKF |
| | MLHVPITMNFGVQGMTIEGFNKKVNQSIQQYDDVNVIGIDRGERHLLYLTVINSKG |
| | EILEQRSLNDIITTSANGTQMTTPYHKILNKKKEGRLQARKDWGEIETIKELKAGYL |
| | SHVVHQISQLMLKYNAIVVLEDLNFGFKRGRLKVENQVYQNFENALIKKLNHLVL |
| | KDKTDDEIGSYKNALQLTNNFTDLKSIGKQTGFLFYVPARNTSKIDPETGFVDLLKP |
| | RYENITQSQAFFGKFDKICYNTDKGYFEFHIDYAKFTDEAKNSRQTWVICSHGDKR |
| | YVYNKTANQNKGATKGINVNDELKSLFACHHINDKQPNLVMDICQNNDKEFHKS |
| | LMYLLKALLALRYSNANSDEDFILSPVANDEGVFFNSALADDTQPQNADANGAYH |
| | IALKGLWVLEQIKNSDDLDKVDLEIKDDEWRNFAQNR |
| 455 | MNNYDEFTKLYPIQKTIRFELKPQGRTMEHLETFNFFEEDRDRAEKYKILKEAIDEY |
| | HKKFIDEHLTNMSLDWNSLKQISEKYYKSREEKDKKVFLSEQKRMRQEIVSEFKK |
| | DDRFKDLFSKKLFSELLKEEIYKKGNHQEIDALKSFDKFSGYFIGLHENRKNMYSD |
| | GDEITAISNRIVNENFPKFLDNLQKYQEARKKYPEWIIKAESALVAHNIKMDEVFSL |
| | EYFNKVLNQEGIQRYNLALGGYVTKSGEKMMGLNDALNLAHQSEKSSKGRIHMT |
| | PLFKQILSEKESFSYIPDVFTEDSQLLPSIGGFFAQIENDKDGNIFDRALELISSYAEY |
| | DTERIYIRQADINRVSNVIFGEWGTLGGLMREYKADSINDINLERTCKKVDKWLDS |
| | KEFALSDVLEAIKRTGNNDAFNEYISKMRTAREKIDAARKEMKFISEKISGDEESIHI |
| | IKTLLDSVQQFLHFFNLFKARQDIPLDGAFYAEFDEVHSKLFAIVPLYNKVRNYLTK |
| | NNLNTKKIKLNFKNPTLANGWDQNKVYDYASLIFLRDGNYYLGIINPKRKKNIKFE |
| | QGSGNGPFYRKMVYKQIPGPNKNLPRVFLTSTKGKKEYKPSKEIIEGYEADKHIRG |
| | DKFDLDFCHKLIDFFKESIEKHKDWSKFNFYFSPTESYGDISEFYLDVEKQGYRMH |
| | FENISAETIDEYVEKGDLFLFQIYNKDFVKAATGKKDMHTIYWNAAFSPENLQDVV |
| | VKLNGEAELFYRDKSDIKEIVHREGEILVNRTYNGRTPVPDKIHKKLTDYHNGRTK |
| | DLGEAKEYLDKVRYFKAHYDITKDRRYLNDKIYFHVPLTLNFKANGKKNLNKMV |
| | IEKFLSDEKAHIIGIDRGERNLLYYSIIDRSGKIIDQQSLNVIDGFDYREKLNQREIEM |
| | KDARQSWNAIGKIKDLKEGYLSKAVHEITKMAIQYNAIVVMEELNYGFKRGRFKV |
| | EKQIYQKFENMLIDKMNYLVFKDAPDESPGGVLNAYQLTNPLESFAKLGKQTGILF |
| | YVPAAYTSKIDPTTGFVNLFNTSSKTNAQERKEFLQKFESISYSAKDGGIFAFAFDY |
| | RKFGTSKTDHKNVWTAYTNGERMRYIKEKKRNELFDPSKEIKEALTSSGIKYDGG |
| | QNILPDILRSNNNGLIYTMYSSFIAAIQMRVYDGKEDYIISPIKNSKGEFFRTDPKRR |
| | ELPIDADANGAYNIALRGELTMRAIAEKFDPDSEKMAKLELKHKDWFEFMQTRGD |
| 456 | MSNFNEFTHLYQLSKTLRFELKPIGETLKHFNESGILDQDEHRAESYKKVKKLIDRY |
| | HKEFMEEALRDFVFQMDDEGKNNSLSEYFFLYSLGKRTEAQDNDFKDVKKNLRE |
| | QIAKYFKASPKYKNLFKQELIKEDLCNNMQCNEEEQKLVEEFHNFTTYFTGFHENR |
| | KNMYSDEEKSTAIAFRLVHQNLPKFIDNIGVFDRVRNIDEIKAGIENLQKHFETEGL |
| | FKQGEKIEDFFTLDYYSRLAVQSRIEIYNAILGGKTTEKGEKIQGLNELINLYNQQH |
| | KETHLPKMKALFKQILSDRQAVSWIEESFKSDNEVLSSVNDFYENLKQNEIFERTK |
| | ELLTSVGSYDLSKVYITNDQQLTSISQQLYGSWAVIENAILAEMQNETPRKKKEDA |
| | EKYNERLKKAYSNRSSFSIAYIDQCLEAVFGENRIPVEQHFANLGKAEIETEAECGK |
| | IKIPDVFTQIEQTYSAAKSLLCNPYPKDKHLSQSDEDIEKVKNLLDALKRFQHFIKPL |
| | TGSGDEAEKDEMFYGDLAELWTEIDQLNSLYNKVRNHLTGKPYSEEKLKLNFENA |
| | TLLNGWDKNKEPDNTAIILRKDGLYYLAIMNKEHNRIFASDKLPNNGECYEKVIYK |
| | LLPGANKMLPKVFLSKKGIEVFKPSQEILAIYNNGTHKKGDTFNINDCHKLIDFFKE |
| | SISKHNDWKNFDFHFSDTNSYEDLSGFYREVENQGYKITFQNISSDYIDNLVNEGK |
| | LYLFQIYNKDFSTKRDLSKHKEGTPNMHTLYWQMLFDERNLNDGVYQLNGHAEV |
| | FFRKKSLNYTKPTHPANQPIAKKNPHSKNETSQFTYDLIKDKRFTMDKFLFHVPITL |
| | NFKSGETDNINAKVRQWLQKADDVHIIGIDRGERHLLYLTVIDSKGNIKEQMSLNT |
| | IENKYNGNTYAFDYHNRLDEKEKERDKAKKSWKTVENIKELKEGYLSQAIHKITQ |
| | LMLKYNAIIVLEDLNIGFMRGRQKVEKQVYQKFEKMLIDKLNYLADKKKDPSEVG |
| | GVLNAYQLTSKFESFTKLGRQSGFLFYIPAWNTSKIDPVTGFVNLFDTQYKSDGKA |
| | KMFFSKFKSISYNKDKNWFEFSFDYNDFTSKADGTKTEWTVCTNGERIENFRNGET |
| | SNQWGGRTINLSQKFKSLFDEYGIDFTKDLQNSICSQSKKGFFKQLLHLFKLTVQM |
| | RNSNTETEEEKGKKDFIISPVCVDDKYYNSDIEAEKGKDEEGNWKSELPVNADAN |
| | GAYNIARKGLMILNHIKQSSDPSKKQEYDLTNKAWLNFVQKGSVEGK |

TABLE S14B
Human Codon Optimized Nucleotide Sequences Group X

| SEQ | |
|---|---|
| ID | |
| NO | Sequence |
| 457 | ATGAATACTATGACCCAACGTAGCCCCGTTAGCGGCGGAAAAAACCCTGAGGG |
| | CCAGAAGTCTGTGTTTGACTCTTTCACACATAAGTACGCGCTGTCCAAGACGCT |
| | ACGCTTCGAGCTCGTGCCACAGGGCAAGACGTCTGAGAGTCTTAAGGCCGTGT |
| | TCGAAGAGGACAAAAAAGTTGAAGAGAACTATCAGAAGACCAAGGTACGGCT |
| | CGACCAGCTGCACCGGCTTTTCGTGCAGGCATCCTTCACTGAGAGCAAGGTCA |
| | GTGCGCTGAAACTCGCTTCTTTTGTCAGAGCTTACAATGCCCTGATTGGCGTCG |
| | CAAAAAAAACCCAGACCAAAGAACAGAAATCAGCTTATGAGAAAGAAAGAAA |
| | AGCCCTGCTCTATGAAGTGGCCGGGCTTTTTGATGAGATGGGTGATGAGTGGA |
| | AGGCTCAGTATGAAGAAATCGAGAGCGTCGGGCGAACAGGAAAGCAAAAAAA |
| | GATCAAATTCTCCTCGACCGGTTGCAAGATTCTCACCGACGAAGCCGTCCTGAA |
| | TATCCTCATGGACAAATTCGCTGAGGACACCCAGGTATTCAGCACATTTTTCGG |
| | GTTCTTCACATATTTTGGCAAATTCAACGAGACACGAGAAAATTTTTACAAGAG |
| | CGACGGGACTTCTACTGCCGTGGCGACCAGGGTTGTAGAAAATCTCGAGAAAT |
| | TCCTTCGCAACAAACATATTGTGGAGAGCGAGTATAAGAAAGTAAAAACTGCC |
| | ATCGGACTGACTGATTCCGAAATCCTGGCTTTGACCGATGTCGAGGCCTATCAC |
| | CGATGCTTTCTGCAGGCGGGGATCGATGTTTACAATACCGTTTTAGGCGGCTCA |
| | ACCGAGCTGGAACAATCAGTCAACAAAAAGGTGAACGAATACAGGCAGAAGA |
| | CGGGTAATAAGATCAGTTTTCTCGCTAAACTGCACAACCAGATTCTCAGTGAA |
| | AAGGACGTATTCGAAATGCTGGTGATTAAAGGTGATGCACAGCTCTGGGAAAA |
| | ACTTAAAGTTTTTTCTGAGGAGAACGTGGCATACTGTACCAAAATGCTTGCCCT |
| | AATCCGCGACGCTCTTACCATGCCTGAGAAGTCGGGATATGAGTGGTCAAAGA |
| | TCTATTTTTCATCAGGGGCCATAAATACGATTTCTTCCAAGTACTTCACAAACT |
| | GGTCCGTGCTGAAGGGCGCACTGCTGGATGCTGTAGGCACAGCTAAGGGCGGT |
| | GGCGGAGAACTGCCAGACTTCGTGTCACTGCAGCACGTTCAGAATGCATTAGA |
| | CGTCAACGAAATCAATAAAGGGAAGAAACCATCAGAACTTTTCAGAAGTGAA |
| | ATCTTGAAGCACGCGGCTTTTGTTGAATCGGTGGGGCATTTCACTAATCTTATA |
| | ACCATCTTGCTGAGCGAGCTGGACGCTCGTGTGGCGGAATCCGCGGTGGATTT |
| | GGCCGACTTAAAGAAGGACAGTTTCTGGACTACCGGTGCACTGTCTCAGAGAC |
| | GGAAAGAAAAGGAGGATGAGGGAACTATCCAGATTAATAGGATATCTGCCTA |
| | CCTCAACTCTTGTCGCGATGCACACAGGATGATCAAGTACTTTGCGACTGAGA |
| | ATAGGAGAGACTGGGTCGAACCGGAGGAGGGGTACGATCCAAAGTTTTACGAT |
| | GCTTACCGGGAAGAGTATGCCAAGGACATATTTTTTCCTCTTTACAACGTCGCT |
| | CGCAACTTTTTAACGCAGAAACCCTCAGATGAGAATAAGGTTAAGTTGAACTT |
| | CGAATGCGGCACCCTCTTATCTGGCTGGGATAAGAATAAGGAGCAAGAAAAGC |
| | TGGGAATTATCCTTCGGAAAGACGGAGCGTACTATCTCGCAATTATGAGAAAA |
| | CAGTTCAGTGACATTCTGGAGGAGAAAAAACATCCAGAGGCCTATAGAGCCGG |
| | CGACAACGGTTATTCCAAGATGGAATATAAGCTGTTTCCCGATCCGAAAAGGA |
| | TGATACCTAAGGTAGCATTCGCCGAGACGAATAAGAAGACTTTTGGGTGGACA |
| | CCCGAGGTCCAGGCTATCAAAGACGAGTACGCTAAGTTCCAGGAAAGCAAAA |
| | AGGAGGATCAGTCCGCCTGGAAAAATCAATTCGATGCCAACAAGACCGCCAGG |
| | CTCATCGCATATTACCAAAACTGCCTGGCTAAGGGGGGATATCAGGAGACGTT |
| | TGGTCTGACATGGAAGAAGCCCGAAGAGTACGTAGGAATAGGAGAGTTTAATG |
| | ATCACATTGCCCAACAAAACTACAAAATCAAGTTCGTTCCAGTGGACGCCGAC |
| | TACATTGATGAACACGTGGCCAAAGGAGAGATGTACCTATTCAAGATTAAGAG |
| | CAAAGATTTCGCCTCAGGCAGTACAGGGACTAAAAACGTGCACAGCCTGTATT |
| | TCAGCCAGTTGTTTTCCGAGGCAAACCTAGCTCAGACTCCTACCGTCGTTCAGC |
| | TGGCCGGTAACGCAGAAATCTTCTATAGGGAAGCCTCTGTGGAGCCCGAAAAG |
| | GAGAAACGAAACTTTCCTCGCGATATCACAAAGTATAAGAGATTTACAGAGGA |
| | TAAGGTGTTTTTTCATGTGCCGATAAAAATAAACGCCGGCACCGATGCTATGCG |
| | TTCCCAATATCAGTTCAACAAGATCCTGAACGCTGAATTGATTGCTAAAAGAG |
| | CTAAGGATTTCTGTATTATTGGCATTGATCGTGGGGAAAAGCATTTGGCCTACT |
| | ACTCTGTCATCAATCAGAAAGGCGTGATCGTTGACGAGGGCAGTCTCAATGAA |
| | ATTAGCGGGACAGATTATCACAAGCTCCTGGATGGCAAAGAGAAGGAGCGGA |
| | CCGCCAATCGGCAAGCTTGGCTGCCAGTGCGCCAAATTAAAGACCTCAAGCGC |
| | GGCTATGTCAGCCATGCCGTGAAGAAAATATGCGATCTTGCAATTGAGCATAA |
| | CGCGATTATCGTGCTGGAAAACCTGAACATGCGCTTTAAACAGATAAGAAGCG |
| | GGATCGAGAAGTCCGTCTATCAGCAGCTGGAGAAGCAGTTAGTCGACAAATTA |
| | GGGCACATGGTGTTTAAGGACAGGCCTGAACTGGAGATCGGCGGAGTCTTGAA |
| | TGGCTACCAGCTCGCCGCCCCCTTTGAGTCCTTTAAGGACATGGGTAATCAGAC |
| | AGGAATTGTGTTCTACACCGAAGCCGCTTACACAAGCACCACAGACCCCGTGA |
| | CTGGTTTTAGAAAAAACGTGTATGTGAGCAATTCAGCAACTAAAGAAAAGCTA |
| | GAGAAAGCCATAAAATCCTTCGACGCTATTGGGTGGAATGAAGAGAGGCAAA |
| | GTTACTTTATTACCTACGACCCTGTGAGATTGGTGGATAAGAAGGAGAAGACG |
| | AAAACAATTTCGAAGCTATGGACAGTGTACGCCGACGTTCCTCGAATCCGGAG |
| | GGAGCGAAATGAACAGGGCGTCTGGAATGCACGGAACGTGAACCCCAACGAC |
| | ATGTTTAAGAGCCTGTTCGAGGCCTGGAATTTCGAGGACAAGATTGCAACCGA |
| | CTTGAAGAGTAAGATCGAGGAGAAGATGAAGAATGGAGAATTGTCCTCATACA |
| | AGATGATTGATGGGGGGAGCGGAATTTCTTCCAAGCCTTCATCTACATCTTCA |
| | ACATCATCCTAGACATCAGGAACTCCTCTGACAAAACAGATTTCATTGCAAGC |
| | CCTGTAGCACCATTTTTTACCACCTTAAATGCACCCAAACCCAATCCGTGTGAT |
| | ATAAACCTGGCAAACGGAGATTCCCTCGGTGCCTACAATATCGCACGTAAAGG |
| | AATTATCACTATAGGCCGCATCAACGACAACCCAGAGAAACCAGACCTGTATA |
| | TATCTAAAGAACAGTGGGACGAATGGGCCACTAAGCACGGAATCCAACTGTGA |

TABLE S14C
Native Nucleotide Sequences Group X

| | Corresponding | |
|---|---|---|
| SEQ ID NO | AA | Sequence |
| 482 | 440 | TTGTTCAATTTATATTCTTGTTTAACAGAATATATTCTGATGCAAATAA |
| | | CTATATTTACAAATAAAAACAAACGAAACAAAAATAATATGGAAAAC |
| | | TCAAACCTATTTACAAACAAGTACCAAGTAAGCAAAACCCTCCGCTTT |
| | | CGCCTTGAGCCAACCGGAGGTACTGATGATTTACTTCGCCAAGCACAA |
| | | ATCATCGAGGGAGACGAGCGCCGCAATAAAGAGGCTATAACAATGAA |
| | | ACAGATTTTGGACAATTGTCACAAACAGATAATTGAGCGCGTATTGTC |
| | | CGACTTTAATTTTAAAGAGCATTCTCTTGAAGAGTTTTTCAAAGTGTAT |
| | | ACCAGAAACGATGATGACCGCGAAAAGGACATTGAAAATCTCCAATC |
| | | AAAAATGCGCAAAGAAATAGCCGACGCCTTCACCAAACAGGATGTTA |
| | | CGAAACTTTTCTCAAGCAAATTCAAGGATTTTGTTGAAAGAGGCTTGA |
| | | TTAAATATGCATCAAACGAGAAGGAACGCAACATCGTTTCCCGCTTCA |
| | | AAGGTTTTGCCACTTACTTTACAGGGTTCAACACCAATAGACTGAATA |
| | | TGTACTCAGAAGAAGCAAAATCCACAGCTATATCATTCAGATTAATTA |
| | | ATCAAAACTTGATAAAGTTCATAGACAACATCCTTGTATATAAAAAAG |
| | | TGTCTCAAACGTTGCCTTCAGATATGCTATCAAACATTTATATAGACTT |
| | | TAAGGCAATCATCAACACATCAAGTCTTGAAGAATTCTTCTCCATAAA |
| | | CAACTACAATAACATACTCACCCAGAAACAGATTGAGATTTTCAATGC |
| | | AGTTATAGGAGGTAAAAAAGACAAGGATGAAAAAATAATAACCAAA |
| | | GGATTCAACCAATATATAAACGAATACAACCAGACAAATAAAAACAT |
| | | CCGTCTGCCTAAGATGATGCGGTTATTCAATCAAATCCTAAGCGACAG |
| | | AGAAGGTGTTTCTGCAAGACCAGAGCCATTCAATAACGCGAACGAGA |
| | | CAATCAGTTCCGTCCGTGATTGTTTTACAAACGAAATATCAAAACAAA |
| | | TAACGATATTGTCTGAAACAACATCCAAAATTGAATCATTCGACATTG |
| | | ATAGAATTTACATTAAGGGCGGAGAAGATCTGAGAGCATTATCCAAC |
| | | AGTATATATGGATATTTCAATTATATCCATGACCGTATCGCAGACAAA |
| | | TGGAAACACAACAATCCTCAGGGCAAAAAGAGCCCCGAAAGCTACCA |
| | | AAAAAACCTCAACGCATATCTGAAAGGCATAAAAAGCGTCTCTTTACA |
| | | CAGTATTGCAAACATCTGTGGTGACAACAAAGTTATTGAGTATTTCAG |
| | | GAATCTTGGCGCAGAAAACACTGTTGATTTCCAAAGAGAGAACGTTGT |
| | | ATCATTAATCGACAACAAATACAACTGCGCTTCAAATCTTTTATCCGA |
| | | CGCCCAAATTACGGATGAAGAACTTCGCACAAACAGTCGCTCAATTAA |
| | | AGACTTGCTTGACGCCGTCAAGAGTGCCCAACGATTTTTCCGTCTACT |
| | | GTGCGGTTCTGGCAACGAACCAGACAAAGACCACTCTTTTTATGACGA |
| | | GTATACACCAGCATTTGAAGCACTTGAGAATTCAATAAATCCCCTATA |
| | | TAACAAAGTCAGGAGTTTTGTAACCAAAAAAGATTTCTCCACCGATAA |
| | | ATTCAAATTGAATTTCGATAGCAGCAGCTTTCTATCCGGCTGGGCAAC |
| | | AAAATCAGAATATGAGAAGAGTTCTGCTTTTATATTTATTCGAGACAA |
| | | TCAATATTACTTAGGTATAAACAGATGCCTTAGTAAAGAAGATATTGC |
| | | TTACCTTGAGGATTCAACAAGCTCATCAGATGCAAAAAGAGCGGTATA |
| | | TCTGTTTCAGAAAGTGGATGCCAAGAATATCCCCAGAATATTCATCCG |
| | | TTCCAAAGGTTCCAATTTAGCTCCTGCTGTCAACGAATTCCAACTGCC |
| | | GATAGAAACCATTCTTGACATTTATGACAATAAGTTTTTCACTACCAG |
| | | TTATCAGAAAAAAGACCGGACTAAATGGAAAGAATCATTGACCAAAC |
| | | TCATTGACTATTACAAGCTTGGATTCAGCCAGCACAAGTCATACGCAG |
| | | ATTTCGACTTAAAATGGAAAGCATCCAGTGAATATAACGACATAAATG |
| | | ACTTTCTTGCAGACGTACAGAAATCCTGCTACAGAATCGAATTTATAA |
| | | ACATCAATTGGGACAAGTTGATAGAATTCACAGAAGATGGCAAGTTTT |
| | | ACCTATTCCGCATTGCAAATAAAGACTTATCAGGCAACAGCACAGGTC |
| | | TGCCCAATTTGCACACGATTTATTGGAAAATGCTTTTTGACGAAAGTA |
| | | ATCTCAAAGATATTGTCTATAAAATGTCGGGCAATGCTGAAGTCTTTA |
| | | TGCGCTATAATTCATTAAAAAACCCAATTGTGCATAAAGCAGGAGTAG |
| | | AAATCAAAAACAAATGCCCTTTTACTGAAAAAAAGACAAGCATATTT |
| | | GACTACGACATTATAAAAGACCGTCGCTATACAAAAGATCAGCTTGA |
| | | ACTGCATGTTCCAATCCTAATGAACTTCAAAAGCCCATCGGCAGCAAA |
| | | AGGAAATGTTTTCAACAAAGAATGCTTAGAATATATAAAAAATAATG |
| | | GTATAAAACATATTATAGGAATAGACCGAGGCGAACGGAATCTACTTT |
| | | ATATGGTTATAACAGACCTTGACGGCAACATCGTTGAGCAAAAGTCTT |
| | | TGAACCAAATTGCGAGCAATCCAAAATTGCCTCTTTTCAGACAAGACT |
| | | ACAACAAGCTGCTGAAGACAAAGGCTGATGCAAACGCTCAAGCACGT |
| | | CGTGATTGGGAGACAATAAACACCGTAAAGGAGATAAAATTCGGCTT |
| | | CTTGAGTCAGATTGTACATGAAATAGCAATGTCTATAATAAAATACGA |
| | | TGCAATTGTTGTTTTGGAGAATCTGAACAGAGGGTTTATGCAGAAACG |
| | | AGGTCTTGAGAACAACGTCTATCAGAAATTTGAACAAATGCTACTTGA |
| | | CAAGTTGAGCTACTATGTTGACAAAACGAAACATCCGGAAGAGGCCG |
| | | GAGGAGCTTTGCACGCATATCAGCTCTCTGACACTTACGCGAACTTCA |
| | | ATTCTCTGTCGAAGAATGCGATGGTGCGACAGTCAGGTTTTGTTTTCTA |
| | | TATTCCTGCATGGCTTACAAGCAAAATAGACCCCGTCACAGGATTCGC |
| | | CTCCTTTTTGAAATTTCACAGAGATGACAGTATGGCAACAATCAAATC |
| | | TACAATTTCAAAGTTTGACTGTTTCAAATACGACAAGGAATGCGACAT |
| | | GTTCCACATCCGCATTGACTATAACAAGTTTAGCACAAGCTGCAGCGG |
| | | AGGTCAACGCAAATGGGACTTGTTCACTTTTGGCGATCGAATCTTGGC |
| | | AGAACGCAATACAATGCAAAACAGCAGATATGTTTACCAAACAGTCA |
| | | ATTTAACTTCTGAATTCAAAAACTTATTTGCCACAAAGGATATCGACT |
| | | TTTCAGGCAACCTGAAGGACTCTATATGCAAAATTGAGGATGTTGGCT |
| | | TTTTCAGAAAACTAAGCCAACTCTTGTCTCTCACGCTTCAATTACGCAA |
| | | CAGCAATGCTGAAACAGGAGAAGACTTCTTGATTTCCCCAGTAGCTGA |
| | | CAAAGATGGCAATTTCTTCGATTCAAGAAACTGTCCCGACTCTCTCCC |
| | | AAAAGACGCAGATGCCAATGGCGCATACAACATTGCTAGGAAGGGAT |
| | | TAATGCTTGTCGAGCAATTGAAGAGATGCAAAGATGTATCAAAATTCA |
| | | AGCCCGCGATAAAAAACGAGGACTGGTTAGACTATGTTCAACGCTGA |
| 484 | 442 | ATGAACATTTACGAAAATTTTACTAATATGTATCAGGTGAATAAGACT |
| | | ATAAGAATGGGGTTAAAGCCAATATGTAAAACTGATGAAAATATTGC |
| | | TAAATTTCTTGAGGAAGATAAGGAAAGAAGTGAGAAATACAAGATAG |
| | | CTAAAAAAATAATTGATAAGGAAAATAGAGCCTTTATAGAGGATAGA |
| | | TTAAAGGATTTTTCAATTTCAGGGTTAGATGAATATTTGGAATTGCTTA |
| | | AACAAAAAAAGGATATAACAAAAATTCAAAAGAAAATGAGAGATGA |
| | | AATTTCAAAACAGTTAAAAGGCTTCCCTCAATTTGATAGTAAATATAA |
| | | ATTCCAATATATTACAGATAAAGAAGATACAGAAATTTTAGAATATTT |
| | | TAAAAAATTTACTACTTTCTTTACAGGATTTAATTCTAATAGAGAAAA |
| | | TGTTTACTCTAAAGAAGATATTTCGACTTCTATTGGACATAGAATTATT |
| | | CACGAAAATCTTCCAAAATTTATTTCAAATTTTAGGATTTTAAATAAA |
| | | GCAATAGAGGCGTTGGGAACAGGTAAAATAAATGAAGATTTTAAGAA |
| | | TAATGAAATTAATGTTACAGTTGAAGAACTTAATAAAATAGATTATTT |
| | | TAACAAGGTTTTAACTCAATCAGGAATAGATTTGTATAATAATTTGAT |
| | | AGGTATTTTGAATCAGAATATAAATCTATATAATCAACAACAGAAAGT |
| | | AAAAAAGAATAAAATTGGAAAGTTAGAAACATTACATAAACAAATAT |
| | | TAAGTGAAAAAGATAAAGTATCGTTTATTGAAGAATTTGCTGAAGATA |
| | | ACCAGCTTTTGAAATGTATTGATGAATATTTTAAAGAAAAAAGTTGTT |
| | | TGATAAATGTAGATTTAAAGAATTTACTTGAAAATATTGATACTTATA |
| | | GTTTGAATGGTATTTTTATTAAAAATGATAAGTCTTTGAAAAATATATC |
| | | TATTTATTTATATAAAGATTGGGGATATATATCAAATCTTATAAATGA |
| | | AGAATACGATTATAAACACAAGAATAAGGTAAAAGATGATAAGTATT |
| | | ATGAAAAAAGAAAAAAAGCTATAGATAAGATTAAATATTTTTCTATA |
| | | GGATATATTGATGAATTGTTAAAAGATAAAAATGTTCCTATGGTAGAA |
| | | TGCTATTTCAAAGAAAAGATAAATTTAGTAGTAAAAGAATTTAATGCT |
| | | TCTTTAAACAAATTTAATGAATATAAGTTTACAAATGAGTTAAAAACT |
| | | GATGAAATTGCTGTTGAAATAATAAAAAATTTATGTGATTCAATAAAG |
| | | AAGATACAGGGTATAATAAAGCCTTTAATAATTACTGGAAATGATAA |
| | | AGACGATGATTTTTATGTGGAAATCAATTATATATGGGACGAGCTTAA |
| | | TAAGTTTGATAAAATATATAATATGGTTAGAAATTATCTTACAAAAAA |
| | | GGATTACATAGAGGAAAAAATTAGAATGATGTTTTCAAAGAGTAGTTT |
| | | TATGGATGGTTGGGGAAAAGATTATGGAACAAAAGAAGCACATATAG |
| | | TTTATCATGATAAAAATTATTATTTAGTAATAGTTGACGAAAAATTAA |
| | | AATTAGAGGATATAGATAAATTATATAAACCAGGTGGAGATACTGTA |
| | | CATTATATATATAATTATCAGTCAATAGACTATAGAAATATTCCTAGA |
| | | AAATTCATATATTCTAAGGGTAACAGATTTGCACCATCTGTGGAAAGA |
| | | TATAATTTACCAATAGAAGATGTTATCGAAGTGTATAATAATAAATAT |
| | | TATAGAACGGAGTATGAAGAGAAAAATCCTAAAATTTACAAAAAATC |
| | | ATTAACATCCTTAATTGATTATTTTAAAATAGGGGTAAATAGGGATAT |
| | | GGATTTTGAAAAATTTGATATTAAATTAAAAGATTCAAATGAATACAA |
| | | AAATATAAATGAATTTTATTATAATTTGGAAACTTGTTGCTATAAGTTA |
| | | CAAGAAGAAAAAGTTAATTTTAGTGTACTTGAAGAGTTTTCTTATAGT |
| | | GGAAAAATTTATTTATTTAAAATATACAATAAGGATTTTTCTAAATAT |
| | | AGCAAAGGAACACCTAATCTCCATACTTTATATTTTAAAATGCTATTT |
| | | GATAAAGAAAACCTTGAAAATCCTATTTATAAACTTAGTGGAAATGCT |
| | | GAAATGTTTTTTAGAAAAGGAAATCTTGATTTAGATAAAACAACTATA |
| | | CATCATGCTAACCAGCCAATAAATAACAAAAATCCTAATAATAGAAA |
| | | GAGACAAAGTGTATTTAAATATGACATAATTAAAAATAGAAGATATA |
| | | CAGTTGATAAATTTGCATTACATATGTCAATTACTACAAATTTTCAAGT |
| | | ATATAAGAATAAAAATGTTAATGAAACTGTAAACAGAGCTTTAAAAT |
| | | ATTGTGATGACATTTATGCTATAGGTATAGATAGAGGAGAAAGAAATT |
| | | TATTATATGCTTGTGTAGTAAATTCAAGGGGAGAAATAGTAAAACAAG |
| | | TTCCTTTAAATTTTGTAGGTAATACAGATTATCATCAATTACTTGCAAA |
| | | AAGAGAAGAAGAAAGAATGAATAGCAGGAAAAATTGGAAAATCATT |
| | | GATAATATAAAGAATTTAAAGGAAGGCTATTTAAGTCAGGCTATACAT |
| | | ATAATAACTGACTTTATGGTTGAATATAATGCTGTACTTGTTTTAGAAG |
| | | ATTTGAATTTTAGATTTAAAGAAAAAAGAATGAAATTTGAAAAAAGT |
| | | GTTTATCAAAAATTTGAAAAGATGCTTATTGATAAATTGAATTTCTTA |
| | | GTTGATAAAAAGCTTGATAAGAACGCCAATGGTGGATTGTTTAATGCG |
| | | TATCAATTAACAGAAAAATTTACAAGCTTTAAAGATATGAAAAATCAA |
| | | AATGGTATAGTATTTTATATTCCTGCTTGGATGACAAGCAAAATTGAC |
| | | CCAGTTACAGGATTTACAAATTTATTCTATATTAAATACGAGAGTATT |
| | | GAAAAGGCTAAAGAGTTTTTTGGTAAGTTTAAATCAATAAAATTTAAT |
| | | AAGGTAGATAACTATTTTGAATTTGAATTTGATTATAATGATTTTACTG |
| | | ACAGAGCTCAAGGTACAAGGTCTAAATGGACAGTTTGTAGTTTTGGAC |
| | | CTAGAATTGAAGGTTTTAGAAATCCTGAAAAAAATAATAATTGGGATG |
| | | GTAGAGAAATAGATATAACAGAGGAAATTAAAAAATTACTTGATGAT |
| | | TATAAGGTATCTTTAGATGAAGATATTAAAGCTCAAATTATGGATATA |
| | | AATACCAAGGATTTCTTTGAAAAATTGATTAAATATTTTAAACTTGTAT |
| | | TGCAAATGAGAAACAGTAAAACAGGTACAGATATTGATTATATCATTT |
| | | CTCCGGTTAGAAATAAGCAAAATGAATTTTTTGACAGTAGAAAGAAA |
| | | AATGAAAAATTGCCTATGGATGCAGATGCAAATGGTGCTTATAATATT |
| | | GCTAGAAAAGGCTTAATGTTTATTGATATAATAAAAGAAACTGAAGAT |
| | | AAAGATTTAAAGATGCCTAAATTGTTCATTAAAAATAAGGATTGGTTG |
| | | AATTATGTACAAAAGAGTGATTTGTAA |
| 485 | 443 | ATGAAAGCAGAATTGTTTAAGACTTTTGTGGATGAGTATCCTGTTTCA |
| | | AAAACATTAAGGTTTAGTTTAATACCTGTTGGAAGAACCCTAGAGAAT |
| | | ATTGAGAAAGATGGGATTCTTGATTGTGATGAAAAAAGATCTGAAGA |
| | | GTATAAACGAGTAAAAAAACTCCTCGATGAGTATTACAAGACTTTTAT |
| | | TGAGCATGCTTTGACAAATGTAGAACTTGATATTAATAGTCTTGAAGA |
| | | ATATGAGAGACTTTATAATATAAAAAATAAATCCGACAAGGAAAAGG |
| | | CAGATTTTGATAGTGTACAGAAAAATCTAAGAAAACAAATAGTCAAA |
| | | GCTTTAAAAGAAGATGAGAAATATAAATTTTTATTTAAAAAAGAAATT |
| | | ATTGAAAAGGAATTAGTGGACTTTTTAAATGGAAGAGATTCAGATGTT |
| | | GAATTGGTTAAATCATTTAAGGGCTATGCTACTATGTTTCAAGGCTTTT |
| | | GGGATGCAAGAAAAAATATATTTTCTGATGAAGAAAAGTCTACAGCT |
| | | ATTGCATATCGAATAATTAATGAAAATCTTCCAAAATTCATTTCGAAT |
| | | AAAAATATATATTTTACTAAAATACAACCTGAAATGGATGCTGAACTT |
| | | GATCAATTAACGTTATCTAATAATTCAAATGAAATTCGTGATATTTTTA |
| | | AATTGGAGTATTTTTCTAAAACTATAACTCAAACAGGTATTGAAATAT |
| | | ATAATGGTATTTTAGGTGGATATACAATCGATGAACAGGTAAAGTTGC |
| | | AAGGAATCAATGAAATTGTGAATTTGCATAATCAAAAAAACAAAGAT |
| | | AGTGGAAAAATTCCAAAACTTAAAATGCTTTATAAGCAGATTTTATCT |
| | | GATACAAATACGTTATCATTTATAGCAGAAGGATTTGAAACAGATGAT |
| | | GAAGTGCTTGAGTCTTTAAATATTTTTTATGATGTTTTCAATGAAAATA |
| | | TACTTGATGAGGATTTAGGTATTATTAATTTATTGAGAAATATAGATA |
| | | AATTTTCATATGATGGCATTTATATAAAGAATGATAAAGCTTTAATAG |
| | | ATATTTCTAATTATTTATTTGGAGATTGGCATTATATTAAAAATGCCAT |
| | | TAATAAGAAGTATGAAATTGATAACCCAGGTAAAAATACAGAAAAGT |
| | | ATATTGTAAAGAGAAACAAGTTTATAAAAAGCTTTGATAGTTTTTCTT |
| | | TGAAATATCTTCAAGATTGTACAGGAAGTAAATTTAATGAACATATAT |
| | | TAATTAAAATAAATAATCTTATTGATGATGTAAAAAAAGCGTATAATT |
| | | CAGTTGCACTATTGATTAAGAATAAATATGAAGGTACGAATTTAATAA |
| | | ACGATAAAGATGCTATTGAAAAAATAAAACAATTTTTGGATTCTATGA |
| | | AAAGTTTAGTTTCATTTATTCGTTGTTTTGAAGGTACTGGTCAAGAGCC |
| | | AGATAGAGATGAGATTTTCTATGGTGAATTTGATACAGGAAAGAAGA |
| | | CATTTTATTACTTAAACAATATATATAATAAAACGCGTAATTATGTTAC |
| | | AAAAAAACCTTATAGCATAGAAAAATATAAATTAAATTTTGACAATGC |
| | | AGAATTATTAACAGGATGGGATTTAAATAAAGAGACAAGTAAGGCTA |
| | | GCATTATTCTAAAAAAAGATAATTTGTATTATTTAGGAATAATGAAAA |
| | | AGAGCGACCGCAGAGTATTTTTGAATGTACCAGAGACAGAAAGTACA |
| | | TATAATTGTTATGAAAAAATGGAATATAAGTTGTTACCAGGTCCAAAT |
| | | AAAATGTTACCTAAAGTGTTTTTTGCTAAATCAAATATAGACTATTAT |
| | | GACCCTAGTCCTGAAATTATGAGGATATATAAAGAAGGCACTTTTAAA |
| | | AAGGGTGATAATTTCAATATAGATGATTGTCATGATTTAATAGATTAC |
| | | TTTAAAGAATCTTTGGATAAAAATGATGATTGGAAAATTTTTGATTTT |
| | | GACTTTTCGGAGACATCATCTTATAAGGATATAGGGGAATTTTATAAA |
| | | GAAGTACAACAGCAAGGATATAAAATTAGTTTTAAGAATATAGCATCT |
| | | TCTTATGTAGATGAGCTTGTTGAAAATGGTAAGTTGTATTTGTTTCAAA |
| | | TATACAATAAAGACTTTTCTAAAAATAGTAAAGGAACTGAAAATCTAC |
| | | ATACAATGTATTGGAGAGCCTTATTTGATGAAGAAAATTTAGAAAATG |
| | | TAATATATAAATTGAACGGTGATGCTGAGATTTTCTTTAGACGAAAGA |
| | | GTATTTCAGAAAATGAGAAAATAGTTCATCCTGCACATGTTGAAATTG |
| | | AGAATAAAAATGATGAGACTAGAAAAGAGAAAAAAACAAGTATTTTC |
| | | AATTATGATATTATAAAAGATAAACGTTTTACAGTTGATAAATTCCAG |
| | | TTCCATGTACCTATTACACTGAACTTTCAAGCAATAGATCGTAAAAGT |
| | | GATATTAATTTACGTATGAGACAAGAAATTAAAAAGAATAAGGATAT |
| | | GCATATAATAGGAATAGATAGAGGAGAGCGAAACTTATTATATATAA |
| | | GCATAATAGATCTTGATGGAAATATTGTAAAACAAGAATCACTTAATA |
| | | CTATTACCAATGAGTATGATGGTAAGATTTATACTACTGATTATCATA |
| | | AATTACTTGATAAAAAGGAAGAAAAACGTAAAGTTGCTCGTCAAACA |
| | | TGGAATACTATAGAAAATATAAAAGAATTAAAGGCTGGGTATATGAG |
| | | TCAGGTGGTTCATAAAATAACTCAGTTAATGATGGAGTATAATGCTAT |
| | | AGTAGTATTAGAAGACTTAAACACTGGATTTAAACGAGGTCGTCAGA |
| | | AGGTTGAAAAACAAATTTATCAGGCTTTTGAAAAAGCTTTAATTAATA |
| | | AATTAAACTATTACGTTGATAAGAAAGTAGATAAAAATGAGATATCTG |
| | | GTTTATATAAACCTCTTCAATTAACAAAAGAATTTGAAAGTTTTAAAA |
| | | AGCTTGGAAAACAGAGTGGCGCTATATTTTATGTTCCTGCATGGAATA |
| | | CAAGTAAAATGGATCCAACAACAGGATTTGTTAATTTATTATCAGTAA |
| | | AATATGAAAATATGGAGAAATCAAAAGAATTTATTAACAAAATAAAA |
| | | GATATTAATTTTAAGGAAGATGATTGTGGAAAATACTATGAATTTCAT |
| | | ATTGATTTCAATGAGTTTACCGATAAGGGCAAAGATACAAAAACAGA |
| | | TTGGAATATTTGTAGTTTTGGCAAACGTATAGATAATGCTCGAAATCA |
| | | AAAAGGGGATTTCGAAAGTAAGATGATAGACTTAACAAATGAGTTTC |
| | | ATAACTTATTCAAAAAGTACGGCATTAATGATAATTCTAATCTGAAGG |
| | | AAGATATTTTAAATGTAAAAGAAGCCAAATTTTATAAAGAGTTTATAA |
| | | ATTTATTTAAATTGATGCTACAGATTCGAAATAGCGAATCAAATGAAA |
| | | AAGTTGATTTTCTTCAATCACCAGTTAAGAATAATAAAGGAGAGTTTT |
| | | TTAATTCAAATAATGTAAATGGAAATGAAGCTCCAGAAAATGCCGAT |
| | | GCAAATGGAGCATATAACATTGCTAGAAAAGGATTGTGGATTGTTAAT |
| | | CAGATTAAAACAATGCCAGATAGTCAAATGCATAAGATTAAGCTTGC |
| | | AATGAAAAATCAAGAATGGCTTTTATTTGCACAAAAAGGGAATGTATAA |
| 487 | 445 | ATGCCAAATATTTCTGAATTTAGTGAACATTTTCAAAAGACTTTAACA |
| | | TTAAGAAACGAGTTAGTACCTGTAGGAAAAACTCTTGAAAACATCATT |
| | | TCTTCTAATGTATTGATAAATGATGAAAAAAGAAGTGAAGACTATAAA |
| | | AAGGCTAAAGAGATTATAGACTCTTATCATCAAGAGTTTATAGAAAAA |
| | | TCTCTTTCATCTGTAACTGTTGATTGGAATGATTTGTTCTCCTTTTTATC |
| | | CAGAAAAGAACCAGAAGACTATGAAGAAAAGCAGAAGTTCCTAGAA |
| | | GAGCTAGAAAGTATTCAGCTTGAAAAGAGAAAAAGCATTGTTAATCA |
| | | ATTTGAACAATATGATTTTGGTTCATACACAGATTTAAAGGGAAAGAA |
| | | AACAAAGGAACTAAGTTTTGAGAGCCTTTTTAAATCGGAGTTATTTGA |
| | | TTTTCTTTTACCTAATTTTATAAAAAATAATGAAGACAAAAAAATAAT |
| | | AAGTAGTTTTAACAAGTTTACTTCTTACTTTACTGGTTTTTACGAAAAT |
| | | AGAAAGAATTTATATACATCAGCACCTTTGCCAACGGCTGTTGCTTAC |
| | | AGAATAGTTAACGATAACTTTCCTAAATTCATTTCTAACCAAAAGATC |
| | | TTTCGTGTGTGGAAAGACAATGTTCCTAAGTTTGTAGAAATAGCGAAA |
| | | ACTAAACTAAGAGAAAAAGGTATTTCTGATTTAAATTTAGAATTTCAA |
| | | TTTGAGTTATCAAATTTCAATTCATGTTTAAATCAAACAGGAATTGATT |
| | | CTTACAATGAACTGATAGGTCAACTAAACTTTGCAATTAACCTTGAAT |
| | | GTCAGCAAGACAAGAATTTAAGTGAGCTTTTAAGGAAGAAAAGAAGC |
| | | CTTAAAATGATACCTCTGTATAAACAGATTTTATCAGATAAAGACTCT |
| | | TCATTCTGCATTGACGAATTTGAAAATGATGAATCAGCGATAAATGAT |
| | | GTTATTTCTTTTTATAAGAAAGCGGTTTGTGAAAACGGTCCTCAACGA |
| | | AAACTATCCGAATTATTACGTGATTTGTCATCTCACGATCTTGATAAG |
| | | ATATTTATTCAAGGTAAAAACTTAAATTCAATTTCTAAAAATTTATTTG |
| | | GAGGAAAAAACTGGTCTTTACTCAGAGATGCCATTATTGCAGAAAAGT |
| | | CAAAAGACAAAAGCTATAAAAAGGCTATAAAGACAAATCCTTCATCA |
| | | GACGATCTTGACAGAATTCTATCTAAAGATGAATTTTCAATTTCATACT |
| | | TATCAAAGGTATGCGGAAAAGATTTGTGCGAAGAAATTGATAAATTTA |
| | | TTAAAAATCAAGATGAACTGTTAATTAAAATAAATTCACAAGCTTGGC |
| | | CAAGCTCTCTTAAGAATAGTGACGAGAAAAATCTCATAAAATCACCAT |
| | | TAGATTTCTTGTTAAATTTTTATAGATTTGCTCAGGCATTTTCTTCAAA |
| | | TAATACAGATAAGGATATGTCTTTATATGCCGATTATGATGTATCTTTA |
| | | TCTTTATTGGTCTCTGTAATAGGTCTTTATAACAAAGTTAGAAACTATG |
| | | CAACCAAGAAGCCTTATAGTCTTGAAAAAATCAAATTAAATTTTGAAA |
| | | ATCCAAACTTAGCAACAGGTTGGAGTGAAAACAAAGAAAATGATTGT |
| | | TTATCAGTAATCTTATTAAAAAATCAAATTTACTATTTAGGTATTTTAA |
| | | ACAAAAGTAATAAACCTAATTTTTCTAATGGTATTTCTCAACAACCTTC |
| | | TTCAGAAAGCTGCTATAAAAAGATGAGATACTTATTATTCAAAGGATT |
| | | CAATAAAATGTTACCTAAATGTGCTTTTACAGGAGAAGTAAAAGAGC |
| | | ATTTTAAGGAATCTTCTGAAGATTATCATCTTTATAACAAGGATACTTT |
| | | TGTTTATCCTCTTGTTATTAACAAAGAGATTTTTGATCTAGCATGCAGT |
| | | ACAGAAAAAGTAAAAAAATTTCAAAAAGCATATGAAAAGGTCAACTA |
| | | TGCAGAATATAGGCAATCACTGATAAAGTGGATTTCTTTTGGCCTTGA |
| | | ATTTTTATCTGCATACAAAACTACATCTCAATTTGATTTATCAAATTTA |
| | | AGAAAACCTGAAGAATATAGCGATCTAAAAGAATTTTATGAAGATGT |
| | | AGACAATCTAACATACAAGATAGAATTAGTAGATTTAAAAGAAGAAT |
| | | ATGTAGACTCTTTGGTTGAAAATGGGCAACTGTTTTTATTCGAAATAA |
| | | GAAATAAAGATTTTGCAAAAAAATCTAGTGGAACTCCTAATTTACATA |
| | | CTCTTTATTTTAAAAGCATATTTGATCCGAGAAATTTAAAAAATTGTAT |
| | | TGTCAAACTTAATGGTGAAGCCGAGATTTTCTACAGAAAGAAAAGCTT |
| | | GAAGATTGATGACATAACAGTTCATCAAAAAGGAAGTTGCCTTGTTAA |
| | | TAAAGTTTTCTTCAATCCTGATTCTGGCAAATCCGAGCAGATCCCAGA |
| | | CAAAATCTATAACAATATTTATGCATATGTTAATGGCAAATCAACAAC |
| | | TTTATCAAAAGAAGATGAGTTTTTTTACACAAAAGCCACAATAAAAAA |
| | | AGCAACTCACGAGATCGTAAAAGATAAACGCTTTACTGTGGATAAATT |
| | | CTTTTTCCACTGCCCAATTACGATTAACTATAAATCTAAAGATAAGCC |
| | | AACTAAATTTAATGACAGAGTATTAGATTTCTTAAGAAAGAATGAAGA |
| | | TATCAACATTATTGGAATAGATCGAGGTGAGAGAAATCTTATCTATGC |
| | | AACTGTAATTAATCAAAAAGGTGAAATTATTGATTGCAGATCTTTTAA |
| | | TACAATCAAGCACCAGTCTTCATCTGTAAATTATGATGTAGATTATCA |
| | | CAATAAATTGCAAGAAAGAGAAAATAATAGAAAAGAAGAAAAGAGA |
| | | TCTTGGAACAGTATTTCTAAAATTGCAGACCTTAAAGAAGGATATCTT |
| | | TCAGCTGTAATTCATGAGATAGCATTAATGATGGTTAAATACAATGCT |
| | | ATTGTTGTTATGGAAAATTTGAATCAAGGCTTTAAGAGAATCAGAGGC |
| | | GGAATCGCTGAAAGATCTGTGTACCAAAAATTTGAGAAAATGCTGAT |
| | | AGATAAACTTAATTATTTTGTTATTAAAAATGAGAATTGGACAAATCC |
| | | TGGAGGAGTTCTCAATGGTTATCAGTTGACAAACAAGGTATCAACAAT |
| | | CAAAGAAATTGGTAATCAATGTGGTTTTTTATTCTACGTACCTGCAGC |
| | | ATATACTTCAAAGATAGATCCTTCAACTGGTTTTGTTAATTTGTTGAAT |
| | | TTCAATAAATACAATAACTCAGATAAACGAAGAGAGCTTATTTGCAAA |
| | | TTTTACGAGATTTGTTATGTGCAAAATGAGAATTTATTTAAATTTTCTA |
| | | TAGATTATGGAAAATTATGCCCTGATAGCAAAATACCTGTAAAAAAAT |
| | | GGGATATTTTCTCTTATGGGAAAAGAATTGTTAAGGAAGATCTAAAGA |
| | | CTGGTTATATGAAAGAAAATCCAGAATACGATCCAACTGAAGAACTT |
| | | AAGAATTTGTTTACATTAATGAGGGTTGAGTATAAAAAAGGTGAAAAT |
| | | ATACTTGAAACAATATCTATCAGAGACATGAGTAGAGAATTTTGGAAT |
| | | TCTCTTTTCAAGATTTTCAAAGCTATATTACAAATGAGAAATAGTCTA |
| | | ACTAATTCACCGGTAGACAGACTTTTATCTCCAGTAAAGGGAAAAGAT |
| | | GCAACCTTCTTTGATACAGATAAAGTTGATGGAACTAAATTTGAAAAA |
| | | TTAAAAGATGCTGATGCAAATGGAGCTTATAACATTGCATTAAAAGGC |
| | | TTATTAATTCTCAAAAATAATGATTCTGTAAAGACAGACAAAGAACTA |
| | | AAAAATGTAAAGAAGGTAAGTCTTGAGGATTGGTTAAAGTTTGTTCAA |
| | | ATCTCCTTAAGAGGATAA |
| 488 | 446 | ATGAAACGCCTAATTGACTTTACAAACATCTATCAGCGATCAAAGACT |
| | | TTGAGGTTTCGATTGGAGCCTATCGGTAAAACGGCCGACTATATTAAG |
| | | GTTTCTCAGTACCTCGAAACTGATGAGCGTTTGGCAAAAGAGAGCAAG |
| | | AAGGTAAAAGAGCTTGCTGATGAATATCACAAAGAGTTTATTGGAGA |
| | | TGTCCTGTCTTCGTTGGAATTGCCTTTAAGCAAAATCAACGAGTTATG |
| | | GGATATATATATGTCCAATGATACAGACCGCGAGATAAAATTCAAAA |
| | | AACTGCAAGAGAACCTGCGAAAGGTGATTGCAGAGGCTTTTAGTAAG |
| | | GACAAACGGTTTGGTAGTTTATTCAAAAAGGAGATAATCACAGACATT |
| | | CTGCCGAAATTCTTGCAAGATAAGGATGATGATATTAAGATCGTAAAT |
| | | AGATTCAAGGGATTTACCACATATTTTTACGCCTTTCATAAAAATAGG |
| | | GAAAATATGTATGTCTCGGAAGAGAAATCGACTGCAATACCATATCG |
| | | AATTGTGAATCAAAATCTCGTCAAGTATTTTGACAACTACAAGACGTT |
| | | CAAAGAGAAGGTAATGCCTCTTCTGAAAGACAAGAATATAGTCGAAA |
| | | GCATAGAGAGAGACTTCAAAGACATCTTGAACGAAAAATCAATAGAG |
| | | GATGTTTTTGGCCTTGCCAACTTCACTCATACTTTATGTCAGGCTGACA |
| | | TCGAGAAATACAATACGTTGATAGGTGGCCTTGTCGTCAAAAACGAA |
| | | AAAAAAGAGATTAAAGGTATTAATCAGTACATTAACGAACATAACCA |
| | | AACGAGTAAAAAAGGGAATGGAATTCCGAAACTAAAGCCGTTATTCA |
| | | ATCAGATTTTGAGCGATAGAAAATCGTTATCGTTTACCTTAGACGATA |
| | | TCAAAAAAACGTCGGAGGCTATTCGCACCATTAAGGATGAGTATGAA |
| | | AATCTCCGAGACAAGTTGGCGACCATCGAAAGGCTTATTAAGTCTATC |
| | | AAGGAGTATGATCTTGCAGGTATTTACATCAAGATGGGAGAGGATACT |
| | | TCGACAATATCGCAGCATTGGTTTGGTGCGTATTATAAAATCATCGAA |
| | | GCGATAGCAGATGCATGGGAACGACGAAATCCGAAGAAAAACAGAG |
| | | AATCCAAGGCATATAGCAAGTATCTATCGTCCCTAAAAAGCATCAGTC |
| | | TCCAAGAAATAGATGACCTCAAAATCGGAGAGCCTATAGAGAACTAC |
| | | TTCGCAACTTTTGGCACGACTTGTTCAGACCGAACAAGTGGAGTTTCT |
| | | TCGCTCAATAGGATAGAAGCTGCTTATACCGAGTTCGTGAACAAATTT |
| | | CCTGAAGGATTTGAAGATGGCGATGACTGTAACGATGCCTACTTTAAG |
| | | GCTAATGTGGAAGTCGTCAAAAATCTGCTGGATTCAATTAAAGATTTT |
| | | CAGCGTTTTGTGAAGCCTTTGCTTGGCAATGAGGACGAAAGAGACAA |
| | | AGACGAGGCTTTCTATGGAGAGTTTGTCCCGACATACACAGATATGGA |
| | | TAACATCATAACCCCTCTATACAACCGTGTACGCAATTTTGCCACCAA |
| | | GAAACCATACTCTACAGACAAGATAAAAATCAACTTTGAAAAATCCA |
| | | CACTGCTTACCGGATGGGCAAATTACAAGCAATATGGCGGTGTCTTGT |
| | | TCTGTAAAAATGATAGTGATTTCTATCTTGGCATTGTAAAATCGTCCA |
| | | AGACAGAAATCCATACAGTCGATGATAGCGCCTCGGATATATATAGA |
| | | ATTGATTATGCTCTGATTCCGAACCCGGGCAAAACCATTCCTTGTTTAA |
| | | TGTTTAGGGATGAGGTGAAGGCTGAAAAGGTAAACGGGCGTAAAGAT |
| | | AAACGTACAGGTGAAAATTTGAGATTGGAAGAAGAAAAGGATAAGTA |
| | | TCTTCCTGCAGAGATTAATAGGATACGTAAATCCAGGTCTTATCTGAA |
| | | GAGTTCGGAATGTTATTGCAACCAAGATATGGTTGCATACATCGACTA |
| | | TTACAAAAAATGTTGTATTAGTTATTATGACAAACTATCCTTTACTTTC |
| | | AAGGATAGTAGTATGTACTCGGACTGGAACGATTTTATCGCTGACGTC |
| | | GATGGTCAGGGATATCAATTGAACAGGATACCCGTGTCTATGCAGGA |
| | | GCTAGAGAACTTGGTAGACAATGGCAATATGCTTCTATTCCGTATCGC |
| | | GAATAAAGATTTTTCGCCTAACAGCAAGGGCCGGCCCAATCTTCATAC |
| | | CATATATTGGCGAATGCTTTTCGACCCGGCCAACCTGAAAGATGTTGT |
| | | ATATCAGCTCAATGGTAATGCCGAAATATTCTTCCGTAAGGCAAGCAT |
| | | TACGAGGACGGAGCCTACACATCCGGCTAACGTTGCCATCAAAAACA |
| | | AGAGCGAATATAACAAACAGAATAAGCCGTATAGTACATTCAAGTAC |
| | | GGTTTAATCAAGGATAGGCGCTACACTACCGACCAGTTCGAGTTTCAT |
| | | GTACCCATCACTATGAACTTCAAGCAACCAGAGTCGTCTAAACTACAG |
| | | GACAAGCTCAACAAGCAAGTACTTGACTTCTTGAAACAGGACGGCGT |
| | | ACGCCATATTATAGGCATTGATCGGGGCGAACGTAATCTGCTATACTT |
| | | GGTGATGGTAGATATGGAGGGCAAAATCAAAAAACAAATATCACTCA |
| | | ACGAGATAGCCGGTAATCCGAAGAATTCCGAGTTCAAACAAGACTTC |
| | | CATGCACTGCTGCGCGAGCGCGAAGGAGACCGTCTGGAGTCCCGTCG |
| | | CAGTTGGAACACCATTCAGAGCATTAAGGACCTCAAAGAAGGTTACA |
| | | TGAGCTTGGTGGTTCATGAAATAGCGAATATGATGCTTGAGAATGATG |
| | | CTATAGTAGTGCTCGAAAACCTGAATCGCTCGTTTATGCAAAAGCTCG |
| | | GCGGCAGAGAAAAGTCTGTATACCAAAAGTTCGAAAAGATGCTTATC |
| | | GACAAGTTGGGATACATCGTGGATAAGACTAAAGATGTGTCCGACAA |
| | | CGGAGGCGCACTACATGCTGTACAGCTTGCTGATACGTTTGAAAACTT |
| | | CAATAAGACCCAAAAAGGAGCTATTCGTCAATGTGGATTCATATTCTA |
| | | TATTCCTGCATGGCGTACCAGCAAGATTGACCCCGTTACCGGCTTTGT |
| | | GCCAATGCTTAGGTGTCAATATGAAAGCATCGTAGCATCCAAAGACTT |
| | | CTTTGGAAAGTTCGACAGTATATACTACGATGCGACAGGAAAGTATTT |
| | | TGTCTTCCAAACTGACTTTACCAAATTCAATACCGAGAGCAAAGGAGG |
| | | AATTCAAAAATGGGATATATGCACCTATGGAGACAGAATATATACTCC |
| | | TCGCACCAAAGACCGGAATAATAGCCCTGTTTCGGAACGTGTAAACCT |
| | | TACTGAGGCGATGAAATCACTGTTTGTATTGCATAATATCAATATTCA |
| | | AGGCGATATCAAAGCCGGAATTATGCAGCAGACAGACAAGGCGTTCT |
| | | TCGAGTCACTGCATCGATTGCTTCGACTTACGTTGCAAATACGCAATA |
| | | GCAAAAAATCTACAGGCGAAAACTATGAAGACTATATCATATCGCCG |
| | | GTGATGGGCAAGGACGGTCGTTTCTTCGATTCACGTAACGCGGATGCT |
| | | ACACAACCTAAGGATGCAGATGCCAATGGCGCGTACAATATTGCGCG |
| | | CAAAGGCTTGATGCTGCTTCGCCAGATTCAAGCCCAAGAGAAGCAAG |
| | | ACCTATCCAACGGAAAATGGCTTGAATTTGCCCAAAGGTGA |
| 489 | 447 | ATGATAATTTATAATTGTTATATCGGAGGCAGTTTTATGAAAAAAATA |
| | | GATAGCTTTACTAACTGTTATTCTCTTAGCAAAACCTTGAGATTCAAGC |
| | | TGATACCTATTGGCGCTACGCAAAGTAATTTTGATTTAAACAAAATGC |
| | | TTGACGAAGATAAAAAAAGGGCAGAAAACTATTCTAAGGCAAAAAGC |
| | | ATTATTGATAAATATCATCGCTTTTTTATTGAGAAAGCTTTATCTTCAG |
| | | TTACCGAGAATAAGGTTTTTGACAGTTTTCTCGAAGATATCAGAGCAT |
| | | ACGCTGAGCTTTATTACAGATCAAATAAAGATGACAGCGACAAGGCTT |
| | | CAATGAAAACACTTGAAAGCAAAATGCGTAAGTTCATTGCTTTAGCTT |
| | | TACAGTCGGATGAAGGTTTTAAAGATTTGTTCGGACAGAATTTAATCA |
| | | AAAAGACTCTTCCCGAATTTCTTGAAAGTGATGCGGACAAGGAGATA |
| | | ATTGCGGAATTCGATGGTTTCTCAACATATTTTACCGGTTTCTTCAATA |
| | | ATCGCAAAAACATGTACAGCGCAGACGATCAATCAACGGCAATTTCC |
| | | CACCGTTGCATTAATGATAACCTTCCAAAGTTCCTTGACAATGTCAGA |
| | | ACATTTAAAAATTCTGATGTTGCCAACATTCTCAACAATAACCTTAAA |
| | | ATTCTCAATGAAGATTTTGACGGTATTTACGGAACCTCTGCCGAAGAT |
| | | GTATTCAATGTTGATTATTTTCCGTTTGTGCTTTCACAGAAAGGAATTG |
| | | AAGCATATAATTCTATACTCGGTGGCTATACAAACTCTGACGGCAGTA |
| | | AGATTAAAGGATTAAACGAATATATCTATCTTTACAACCAAAAGAACG |
| | | GGAACATACATCGTATTCCAAAAATGAAACAGTTGTTTAAACAGATTT |
| | | TAAGCGAAAGGGAAAGTGTTTCATTCATACCCGAAAAATTTGATTCGG |
| | | ATGATGATGTCCTTTCTTCAATTAATGATTATTATCTTGAAAGAGACGG |
| | | AGGAAAAGTTCTTTCAATTGAAAAAACGGTTGAAAAGATTGAGAAAC |
| | | TATTCAGCGCTGTTACGGATTACTGCACCGACGGAATATTTGTTAAGA |
| | | ATGCCGCAGAACTTACAGCTGTCTGCTCGGGAGCATTCGGTTATTGGG |
| | | GCACTGTTCAAAATGCCTGGAACAACGAGTATGATGCTCTTAACGGTT |
| | | ATAAAGAAACCGAAAAATATATCGATAAAAGAAAAAAAGCGTATAAA |
| | | TCGGTTGAAAGCTTTTCTCTTGCTGATATTCAAAAGTATGCCGATGTTT |
| | | CTGAATCTTCCGAAACAAACGCTGAAGTTACGGAATGGCTTCGGAATG |
| | | AAATAAAAGAAAAATGCAATTTGGCGGTTCAGGGATATGAATCTTCC |
| | | AAGGACCTGATTTCAAAACCTTATACTGAGTCAAAAAAACTATTTAAT |
| | | AATGATAATGCGGTAGAATTGATTAAAAATGCCCTCGACTCCGTGAAG |
| | | GAACTTGAAAATGTTCTTCGGCTGTTGCTCGGCACAGGTAAAGAAGAA |
| | | TCAAAGGATGAAAATTTCTACGGCGAATTTCTTCCTTGCTATGAGCGT |
| | | ATCTGTGAAGTTGATTCACTTTATGACAAGGTCCGTAATTATATGACA |
| | | CAGAAGCTGTATAAGACGGATAAGATTAAGATTAATTTCAGCAACAG |
| | | CCATTTTTTAAGCGGGTGGGCGCAGACTTATTCAACCAAAGGTGCTTT |
| | | AATTGTAAAAAAAGAGAATAATTATTATTTAGTGATTGTTGATAAAAA |
| | | GCTTTCAAATGATGACATAGTGTTCCTGGGTACAAATACTCAACTAAG |
| | | TCCTGCAGAAAGGATTGTATATGATTTTCAAAAGCCTGATAACAAAAA |
| | | CACCCCAAGGCTGTTTATTCGTTCAAAAGGAACAAGCTATGCTCCGGC |
| | | AGTAAAAGAGTATGATTTGCCTATATCGGATATTATTGAGATATATGA |
| | | TAACGAATACTTTAAAACTGAATACCGAAAAATTAATCCTAAGGGATA |
| | | TAAAGAAGCCCTCATAAAACTTATAGATTATTTTAAGCTTGGCTTCAG |
| | | CAGGCATGAATCATATCGTTGTTTTAATTTCAAATGGAAAGAAAGCGA |
| | | ACAATATAGCGATATTTCCGAGTTCTACAATGATGTTGTCAAATCCTG |
| | | TTATCAATTAAAGAGCGAATCGATCAATTTTGACAGTTTATTAAAACT |
| | | TGTAGATGAGGGCAAACTCTATCTGTTTCAGCTGTACAACAAGGATTT |
| | | TTCCGAACACAGTAAGGGCACTCCTAATCTCCATACTCTTTATTTCAAA |
| | | ATGCTGTTTGATGAAAGGAACCTTGAAAATGTTGTATTCAAACTCAAC |
| | | GGTGAAGCCGAAATGTTCTATCGTGAAGCAAGTATCAGTAAGGATGA |
| | | TATGATTGTTCACCCAAAAAATCAGCCCATCAAAAACAAGAATGAGC |
| | | AAAACAGCAGAAAGCAAAGCACATTTAAATATGACATTGTTAAAGAC |
| | | AGACGCTATACTGTTGACCAGTTTATGCTTCATATACCGATAACGCTC |
| | | AATTTTACCGCAAATGGCGGCACAAATATAAACAATGAAGTCCGCAA |
| | | GGCTCTCAAGGACTGTGATAAGAACTATGTTATAGGTATTGACCGTGG |
| | | CGAGAGAAATCTTCTTTATATCTGTGTGGTTGATTCGGAAGGCAGAAT |
| | | TATTGAACAGTATTCATTAAACGAGATTATCAATGAATATAACGGCAA |
| | | TACTTATTCAACCGACTATCACGCTCTTCTCGACAAGAAGGAGAAAGA |
| | | GCGTCTGGAATCCCGCAAAGCTTGGAAAACCGTTGAAAATATTAAGG |
| | | AACTGAAAGAGGGATATATCAGTCAGGTTGTTCATAAAATTTGCGAGC |
| | | TTGTTGAAAAATATGATGCTGTTATCGTTATGGAAGATTTGAACTTTG |
| | | GCTTTAAACAGGGCCGTAGCGGAAAGTTTGAAAAATCCGTTTATCAGA |
| | | AGTTTGAAAAAATGCTTATTGATAAGCTCAATTACTTTGCTGATAAGA |
| | | AAAAATCTCCCGAAGAAATCGGAAGCGTTCTGAACGCATATCAGCTTA |
| | | CTAATGCTTTTGAAAGCTTTGAGAAGATGGGAAAGCAGAATGGGTTTA |
| | | TCTTCTATGTTCCTGCGTATCTTACGAGTAAAATTGACCCGACGACAG |
| | | GCTTTGCGGACCTGCTTCATCCGTCGTCAAAGCAAAGCAAGGAATCTA |
| | | TGCGTGATTTTGTAGGCCGCTTTGACTCAATCACATTCAACAAAACAG |
| | | AAAACTACTTTGAATTTGAACTTGATTATAACAAGTTCCCGAGATGTA |
| | | ATACGGATTACAGAAAGAAGTGGACCGTCTGTACTTACGGCAGCCGT |
| | | ATAAAAACCTTCAGGAATCCTGAGAAAAACAGTGAATGGGACAATAA |
| | | AACGGTTGAATTAACGCCTGCTTTCATGGCTCTTTTTGAAAAATATTCA |
| | | ATAGATGTTAACGGAGATATTAAGGCGCAGATAATGTCCGTTGACAA |
| | | AAAAGATTTCTTTGTTGAGCTTATTGGCCTTCTGAGGCTTACTCTTCAA |
| | | ATGAGAAACAGCGAAACAGGCAAGGTCGATAGAGATTATCTTATATC |
| | | ACCCGTTAAAAACAGCGAGGGCGTATTCTATAACAGCGATGATTACA |
| | | AGGGTATTGAAAACGCTTCGTTACCCAAAGACGCAGATGCAAACGGT |
| | | GCATACAATATTGCAAGAAAAGGCTTGTGGATTATTGAGCAGATTAAA |
| | | GCTTGTGAAAATGATGCGGAGCTTAACAAAATTCGCCTTGCTATGTCT |
| | | AACGCCGAATGGCTTGAATACGCACAGAAAAAATGA |
| 490 | 448 | TTGCTCCCTGCCCGCCGGTGCAACGGAGCGGTTCCGCACATCCGGCAC |
| | | ACGGACAACCACGCAACACCAGGACATTCCATGAGCCTCGATTCCTTC |
| | | ACCCGCAAATACAAACTCGCCAAAACCCTCCGCTTCGAGCTCCGTCCC |
| | | GTGGGGCGGACCCTCGAAACGTTCCGTTCGAAGTTCCTGCCGGGCGAC |
| | | GAACGCCGCGCCGCCGCCTATCCCGGCGCAAAGGAGATGCTGGACAA |
| | | CGAGCACAAGGCGCTTCTCGAACGGGCGCTCGCCAATCCGCCGGCGG |
| | | GGTTGGATTGGAGCGGGCTGGCACAGGCCCACGACACCTACCGAACA |
| | | AGCGACAAGTCGAAAGCGGCGAAAGGCGCCTTGGCCGCCCGGCAGGC |
| | | GGTATTCCGGAAGGCACTGGCGGACCACCTGACGAAAGACCCGTCAT |
| | | ACAAAACCCTGACGGCCGCCACGCCGAAAGACCTTTTCAAGGCGCTG |
| | | AAGGCACGGTGCGAAGAGGCCGGACAGCCGGTTCCCGGCGACTTGCA |
| | | GACGTTCCTGCGCTTTTCCTGCTATTTCAAGGGCTACCAGGAAAACCG |
| | | CCGCAACATCTATTCGGACAAGGCGCAGGCGACGGCGGCGGCGAACC |
| | | GGGCCGTCAACGGGAATTTCCCCCGTTTCCTCGAAGACGTCCGCATCT |
| | | TCCGGCACATCGCGGAACGGTATCCGCAGATTCCCGCCGATGCGGCGC |
| | | GCGAACTCGCTCCGCTGCTCGAAGGGCGGACGCTCGATTCCATTTTCA |
| | | CCCCCGCCGCCTACAACGGCTTCCTCGCCCAGTCGCGCATCGACTTTTT |
| | | CAATTCGGTTCTCGGCGGATTCGTTCCCGCCGAAGGCGAAAAGACCCG |
| | | CGGCATCAACGAATTCGTCAACCTCTACCGGCAACGGCACGAAGACG |
| | | CCCGCGAAGACCGCGCCCTCGCCCCGCTCCGCCCCCTCCACAAGCAAA |
| | | TCCTCAGCGACCGCGAATCGCATTCCCTCGTTCCCCGCATGTTCGAAA |
| | | ACGACGGCGCCGTCGTGTCGGCCATCCGGGAGATGCTCGACAAGCGG |
| | | CTTCTCGCCCTGGAGACGGAGAACGGGACCGAAAACGTTCCCGACGC |
| | | GCTCCAATCCCTTCTGGCGACGCTTTCCCCGTCGCCCGCCATCTGGATC |
| | | GACGGCGCGGAAATCACCCGCGTTTCGAAAGACCTGCTCGGTTCGTGG |
| | | AACGCGCTCTCCATCCTCATGGAGGCCGCCGCCGAAATCCGGTTCGCT |
| | | TCGGAAAGCACGGAGAAAAAACGCGACGCCGCCGTCGCGAACTGGAT |
| | | GAAAAAGCCGGTGTTTTCCCTCGCGGAAATGGGCGGGCTCCGCGTGG |
| | | ATACGGACAACGGGGCGAACCCCGTCGACGTGTCGGGACTCTGGAAA |
| | | GGGCCCGTTGCGGCCGCGCGTTTCGACGCCGTCCGCAAGGCCGTCGCC |
| | | GAAGTGCGCCCGGTCCTCGATTCCGCCCCGTCCGGGGAGGGGACGCCC |
| | | CTCCGCGAACGCCAGGAGGACATCGCCCGGATCAAGGCGGCGCTCGA |
| | | CGCCATCCTCGACCTGCTCCGTTTCGTCAAACCGCTCCGCGCGGGCGG |
| | | CGAACTCGACCGCGACGAGGCTTTCTACGGCGCGTTCGACCCGCTTTT |
| | | CGACGCCCTCGACGGCTTCGTTCCGCTTTACAACAAGGTCCGCAACTA |
| | | CCTCACGCGGAAACCGGGCGAAACCGGGAGCGTCAAGCTGATGTTCG |
| | | ACAATCCTAGTTTTCTTGAAGGATGGGAACAGAACCTTGAGACGAAA |
| | | AGAACCAGCATATTGTTTTTCCGAGATGGATTCTACTATCTCGGCGTA |
| | | ATGGCTCCAGACGCAAAGATTAACTTTTCGGCGTTTGCCGTTTCAGCG |
| | | GCTTCCGGTTGCTACCGGAAGGTGGTTTACAAGGCAATTTCAAAAGCG |
| | | GCCCAATACTTCAGCATCAAACAAATCAAGCCACAGAACCCTCCGCA |
| | | ATTCGTTTTGGACTGGCTTGCCAAAGGTTTTGACAAGAAAACCCTGCA |
| | | TCGAGATCAACTCACTCGTTTGATTTCGTATGTCATGGATGATTTCATA |
| | | CCAAATTATCCCCCATTGAAGGATGGAAGCGGGCGAGTCGCCTTTGAT |
| | | TTTTCTTTCCGCAAACCATCCGAATACGGAAGTTGGAAAGAATTCACG |
| | | GACCATATTGCTTCCATGGCCTACAAGATTTCCTTCGAGGACATTCCC |
| | | GCGGAAGCCGTCGACCGCCTCGTCGAAGAAGGGAAGCTGTGCCTCTTC |
| | | CTCCTCTGGAACAAGGATTTCTCGCAAGCGTCCAACGGCCGTCCGAAC |
| | | CTGCACACGATGTATTGGAAGGCGGTGTTCTCCCCGGAAAACCTCCGC |
| | | GACGTCGTCATCAAGCTCAACGGCGAAGCCGAGGTGTTCTACCGCCCG |
| | | AAAAGCATCCGCACGCCCTTCCGCCACAAGGTCGGCGAGAAAATGGT |
| | | CAACCGCCGGGGCCGCGACGGCGCGCCCGTTCCCGAAGCCATCCACG |
| | | GCGAACTCTTCCGCCACGCCAACGGGGACACCGCGCCCCTTTCCGGCG |
| | | CCGCGCGGCAGTGGCTCGAGTCCGGCAACCTCGTGGTCAAGGAGGTG |
| | | ACGCACGAAATCGTCAAGGACGCGCGCTTCGCCGCGGACAAGTTCTC |
| | | GTTCCACGTCCCGGTCACGATCAATTTCAAGCAACCGGACGTGTCCGC |
| | | CCGGTTCAACGACCAGGTCCGCGCCTTCCTCCGCGCCAACCCGGACGT |
| | | GAAGGTCATCGGCATCGACCGCGGCGAACGGAACCTGCTCTACCTCGC |
| | | GCTCGTGGACCGCGAGGGCAACCTGCTCGAACAGCGTTCCTTCAACAC |
| | | CGTGTCCCGGACGCGAAAGGACGGCGTCGTGACGCCCACCGACTACC |
| | | AGGCCAAGCTCGTCCAGTCCGAGAAAGACCGCGCCGAGGCCCGCGCT |
| | | TCGTGGGCGGAAATCGGCGCCATCAAGGACCTCAAGGCGGGATACCT |
| | | TTCCGCCGTCGTCCACGAAATCGCGGAGATGATGGTCAAGCACAACGC |
| | | CATCGTCGTGCTCGAAGACCTCAACTTCGGGTTCAAGCGCGGCCGTTT |
| | | CCGCATCGAGCGGCAGGTCTACCAGAAGTTCGAGAAGGCGCTCATCG |
| | | ACAAGCTCAACTACCTTGTTTTCAAGGACCGCGGCATGGAGGAGCCGG |
| | | GGGGGACGTTGCGCGGCTACCAGCTCACGGATGCATTCGAGAGTTTCG |
| | | AGAAAATCGGGAAGCAGACCGGGTTTCTCTTCTACGTCCCCGCCGGCT |
| | | ACACCTCCAAAATCGACCCGACGACCGGATTCACGAACCTCTTCAACA |
| | | CCAAGAAGTGCACCAACGCCGCCGGCATCCGCGACTTCTTCGCCGCGT |
| | | TCGACGCGATCCGTTGGGATGCCGCCCGCCGTGTCTTCGCCTTCTCCTT |
| | | CGACTACAGGAACTTCAAGACGAGCCAGGAAAGCCATCGGACGAAAT |
| | | GGACCGTTTATTCCGCAGACCGCCGCCTTGCATTCGACAAGGAGTCCC |
| | | GCAGCGAGAGGGAAATCAACCCCACCGCCATCCTCCTCGGGGCGCTG |
| | | GAAGAGAGGGGCATCGCCGTCGCGGATGGATTCGACCTCAAGGCCCT |
| | | GCTTCTCGCCACGGAACCCTCCAAGGCAAACGCCGCCTTCTTCCGCTC |
| | | CGTCTTTTACGCCTTCGACCGGACGCTCCAGATGCGGAACAGCCGCGC |
| | | GGAAGAGGACTACATCCACTCTCCTGTCCTGAACGCCCGCGGCGGGTT |
| | | CTTCGACTCCCGCGAAGCGGGCGACGCGCTGCCCCGGGAGGCGGATG |
| | | CCAACGGCGCCTACCACATCGCCCTCAAAGGCGTCCAGCTCCTGGAAG |
| | | AAAACCTCGCCGCGGAAACGCCAAACCTCAAGATCGAACACAAGGAC |
| | | TGGTTCCGCTTCGCGCAGGAACTCGCGGAGCGCAAGTTCCGTTGA |
| 492 | 450 | ATGACATCTTTATATCCAACAAGTAAAACTATCCGTTTTAAGTTGGAA |
| | | CCTATTGGAAAAACTTCTGAGAATATAAACAAAAATGGCATACTCAGC |
| | | GCAGATGAATGCAAAGCGAAAGACTATTTAAAGATAAAAGAAACGAT |
| | | AGACGCCTATCACAAATATTTCATAGATCAACAACTTCGACTTGTAAA |
| | | AACAGAAACAATAAATAAGCAAAAAACAGGTACAAAATTCTTTCTGA |
| | | TTGATGGCGTACAGAATGTCTACAACATATACAATAATCTGAAAAAAG |
| | | ACAGGAAAGATGAAAAAAATCGCAGGCTTTTTTTAGATAAATGCACT |
| | | GCTCTGCGCAAAAAACTCGTCAGTGAGGCTTTTCCATCTGAAGTAATC |
| | | AAAAAACTGACCAGCGGAAAACTATTCACTGACATTTTGCCAGAGTG |
| | | GGTGGCTCAAGAGAATACTACCAGATCCAACGAAAAAAAACTTTTTTG |
| | | GTCTGATACGTTTAAGCGATTCTCAACATATTTTAGTGGTTTTCACGAA |
| | | AACCGGGAAAATATGTATTCTGGCGAAGAAAAATCTACAGCCATTGC |
| | | CTATAGGTTGATTAACGAAAACCTCCCTCGTTTTTTTGATAATGTAGAA |
| | | AATTTCGGAAAAATACAAAATACTCTGAAAGAATGGACAAGTATTTTT |
| | | AGCGATAAAGAAAAACAACTTTTTAATGAAAAAACAATTAAATCAAC |
| | | TTTTGTATTAGAAAACTATGCAAATTGCCTTACGCAGAGTGATATAAC |
| | | ATGCTATAATAATTTAATTTGTGGGTATACATCTGAAAACAAAGAAAA |
| | | AGTTCGAGGATTAAACGAGTTTATCAATCTCCACAATCAAAAAATTAA |
| | | GGATAAAAAAGAAAAACTCCGCTCGTTTAAGTTATTATATAAACAAAT |
| | | ACTCAGCGATCGCGAAACGGTTTCATTTATCCCATATCAGTTTACTTCA |
| | | ATAAATAAGTTGTATGATGCTATTAATAATTTTTATTTAGTTTGCATCG |
| | | TAAATGAAAAAGATGATGGAGGAGAAAATTGTAATGTTTTTGAAGCT |
| | | ATTGAGAAGCATTTTAAAAAAATAAAAGATGGTAACTATGATTTAAA |
| | | GCATATTTATATATCTCATAGATCTGTTTCATCTATTTCACAAAAAGTT |
| | | TTTGGTAGGTATTCATTTATAAAAGATGCTTTAGAATATTATTATTGTA |
| | | CAGATATAAGACCAAAGTATGAAGAAGAAATACAAAAAGCAAAACC |
| | | ATCTAAACGAGAAAAAATTGAAAAAGAACTAGATAATTATGTAAATC |
| | | AACAATATTTACCTATTGAGTTAGTTGATAAAGCTTGTGAAAAATATT |
| | | CAAAAACATTAGAAGATAATTTTAAACATTCTGAATCTTCAGCAATAA |
| | | CAGATTATTGCGCTCATTTTTTGACCAAAATTATATCCTCTAAAACTTA |
| | | TTCAGCTGGAAAATATGAAGATGAGCGCTACTCTTGCATAAAGGGTGA |
| | | ACTGAATACCCAGCACGATGAAAACTACCATCCTTCAACAGAAGTGGT |
| | | GAACAATATTAAACTCTTCATGGACACTATCCTAGAGTCTATTCACAG |
| | | GCTACGGGATTTCATCATTCGACGCGATGAAGAAAATATTTGTGAGAA |
| | | AGATGAACATTTTTATGAATTTATTGATAAACTTTGGGAAAAGTTGTC |
| | | AGCGTTTATAAATCTCTATGATAAAACTCGCAACTATCTAACAGGAAA |
| | | ACCATATAGCACTGATAAAATTCGCCTTACATTCAACATTCCTGCTCTT |
| | | GCCGACGGTTGGGATGAAAACAAAGAAAAAGATTGCAGAGCTTTCAT |
| | | TTTTAAAAAAAGCGAACAGTATTATCTTGGAATTGCAGCAAAATCTGG |
| | | TTTACATTTCGTTTACAATGATAAAGAACATAATCTCTCTTCATGTTAC |
| | | TGGAAAATGATCTACAAGTATTTCCCTGATCCCAGTAAAATGATCCCG |
| | | AAATGCACAATTACAACAAAAGATGTAAAAACTCATTTTGCATCTAGT |
| | | GATGATAACTATGAACTTTTTGACCCTAAAAAATTTGTCAAACCAATA |
| | | ATTATATCGAAAGATATATATGATATTTACTTCAACGCAGGTCCGAAG |
| | | CCTGCCTTTACGGGAGAATTTATTAAAAATGGAGGCGACCAAAAAGA |
| | | GTATAAAAATGCATTAACAAAATGGATTGATTTTTCTAAACAATTTCT |
| | | TTCTTCTTATTCAAGTACAGCTGTTTATAACTTCGATAGCTTGCGACCG |
| | | TCAAATAGTTATCAAAATATCAGTGAGTTTTATTCTGAAATAGCTGCTT |
| | | TAACTTATAAAATAAATTTTAAACCTATTCTATCAAAATATATTGATG |
| | | ATCTTGTTCAAAAAGGTGATTTATATCTTTTTAGAATTACTACGAAAG |
| | | ATTTTAATTCAACTCATGGAATGCCGAATCTTCATACTTTGTATTGGAG |
| | | ATCCCTTTTTTCTGAAGAAAATCTCGTTAAAACGTGTATAAAATTAAA |
| | | TGGACAAGCAAATATTTTTTATAGAGTTCCATCAATAACTAGTCCAGT |
| | | TATTCACAAAAAAGGGAGTATTCTTGTCGGAAGAACAGCAACCAATG |
| | | GTAAAAACATCCCTGAACACATTTATACTGAATTATGCTTAATCAAAA |
| | | ACGGAAAAAAAGCAGAAAAGGATGCCGATACTGAAACACGTGAATAC |
| | | CTTACAAAAATTAAAATCAGGGAAGCTCAGTACGATATCATCAAGGA |
| | | TCGTCGCTTCACACAGAGTACTTTTCTTTTTCATGTTCCACTGACTTTTA |
| | | ATTTTGGAATAAAGCCAAGTAAAACTTTCGAATTCAATAACAAAATAA |
| | | ACGATTTTTTAAAGAAACATGATGATGTCAATATTATCGGTATTGATC |
| | | GTGGAGAACGGCATCTCCTCTATGTATCTGTCATAAATAGACAAGGGG |
| | | ATATTCTTGAACAGACTACTCTCAACATTTTAAATGGTGTTGACTATCA |
| | | CAGTAAACTTGATAACCGCGAAAAGGAGCGCGCCGGAGCTCGAAAAA |
| | | ACTGGGGTACTATCGGTCGAATTGCCGACTTAAAAGAAGGGTATCTTT |
| | | CCATTGTCATTCATACTTTAGTCGAGATGATGATTCGATATAATGCTAT |
| | | AATTGTAATGGAAGATCTCAATACGGGCTTCAAGCGTGGCCGCTTCAA |
| | | AGTTGAAAAACAGGTTTATCAAAAATTTGAAAAAGCATTAATCACGA |
| | | AATTAAATTATCTTTGTCTTAAAGATATTGCAATAGATAAAATTGGAG |
| | | GCATATTGCACGGTTGGCAGCTCACAAATCCATTTGAAAGCTTTAAAA |
| | | AAATGGGACATCAGAATGGTATTATTTTTTATATTCCAGCTTGGAATA |
| | | CAAGTAAAATTGACCCTATAACTGGATTTGTAAACGTAATAAAACATA |
| | | AATATACAAACAGAGAGTCTGCGAATAAATTTTTTGAAAACTTTAAAG |
| | | AAATCTCTTATAAATCAAAAGATGATGCTTTTGATTTCGTATATATTGA |
| | | TAAATTTTCGGGAAAAAACTGGATTATCACAACAGGAGGAAAGGTAA |
| | | GGTACTTCTGGTTGAAAGATCCGTCAGGGCACGGAGGTTCAACACAG |
| | | AAGGTTGATATTACTCAAAAATTAAAAAATTGTTTCACTAAAAACAAC |
| | | ATACCTTGGGAAAATGGTGAAAATATAGTTGAGACTCTTACAACCTCA |
| | | GTCAATGCCTCGGTTCTGAAAGAAGTGATCTGGTGTCTGCAGCGTGTT |
| | | CTCGCCATGCGAAACAGTTCTGCAGAAGATGGTGTGGATTTTATTTTA |
| | | TCACCTGTCAGGATGCCTGATGGTCGGACATTCTGTAGTAATAACGCT |
| | | GGTGAAAAACTTCCTTGCGATGCCAATGGCGCATATAATATTGCCAGA |
| | | AAAGGCATCTTGGTTATGGAAAAAATAAAAGCCGGCGATAAAAATCC |
| | | GACTTTAATTAAAAATGAGGATTGGCTCAATTATGCACAAAGTGAAGT |
| | | CGTCGTCGCAATGCAAATGAAAAAATATAAGTAG |
| 494 | 451 | TTGTCTCAATCAGAGATTGATTCCTACAATTCAAAAGTTGGCAACCTG |
| | | AATTATTTGGTTAATCTGTATTATCAGCAAACCAAAAATAACCTTCCC |
| | | AAATTTAAAAGCTTATTCAAGCAAATTGGTTGCGGAGAAAAAAAAGA |
| | | TTTTTTAAAAACCATAAAAGATAACGATGAACTTAATGATGTTTTAAC |
| | | AAAAGCAAAAAATCTTGGCGACAAATATTTTACGGGTGGAAAAGATA |
| | | AAGAAACCGTCAAAGCCTTTACAGATTATCTTTTGAATTTGGATAATT |
| | | TTGAAAATATCTATTGGTCGGACAAGGCAATTAACACAATCTCCGGAA |
| | | AATATTTTGGTAATTTCGGCAATTTAAAAGAAAAATTGATAAAAGCAA |
| | | AAATTTTCAATGAAGATAAAAACAGCGGTGAAGCAAAAGTTCCGCGG |
| | | GCAGTCCAGCTTTCTGATTTGTTTGAAGTTTTGGACGGGCAAGATGAT |
| | | TGGGACAAAGAAGGCGTTTTATTTCGTGAAAATTTTAAGGATAATAAC |
| | | AAGGCAAAGCAAGACATTATTAAGAACGCCCAGACGCCGCACGAAGC |
| | | ATTGTTGAAAATGATCTGCAATGACATTGAGGATTTATCTAAAAAATT |
| | | TATTAAGGGGGCGGACGAAGTTCTAAAAATCGAGAAAGGAGATTATC |
| | | AAAAAGACGAAAGCAAGATTGCGATCAAGGCTTGGCTTGACGACGCG |
| | | CTTTTTGCGGGGCAAATTTTGAAATATTGGAGAGTTAAAGCGAAATAT |
| | | TCTATTGATGGAAATTTTACAGAAATCCTCGATAAAGTTAAGGTTTTT |
| | | GAAGTCGTTAAAGACTATGATGTCGTTAGAAATTATTTAACTCAAAAG |
| | | CCGCAAAACAAACTGGGAAAATTAAAATTGAATTTTGAAAATTCATCG |
| | | CTAGCGGCTGGCTGGGATATAAATAAAGAAAAAGACAATTCTTGCGT |
| | | AATATTGCAAAATGAACATGGAAAACAATATCTTGCGATAATGAAAT |
| | | ATGAAGAAACGAGTGTTTTTGAACAAAACAAGAAAAATGAACTTTAT |
| | | ATGTCTGATAATTCCGGGTGGAAAAAAATTAATTATAAACTTTTACCT |
| | | GGACCAAACAAGATGTTGCCAAAAGTTCTATTTTCTTCAAAATGGGTT |
| | | ACTAACAATCCAACACCTGCCAATATAAAGAAAATTTATGGCAAAGG |
| | | AACATTTAAAAAAGGCGATAATTTTAATAAGAATGATTTGCACATATT |
| | | GCTTGATTTTTATAAAAATCAACTAAAAAAATATCCATCTGAAAAAGA |
| | | AAGCTGGGATAAAATTTTTAATTTTGATTTTTCTAATACGAAAAGCTA |
| | | CGAAAGCGTTGATCGGTTCTATGCAGAGGTTGAAAAACAGGGCTATA |
| | | AACTTGAATTTATACCTGTAAAAAAGAATAAGATTGAAGAATTGGTGG |
| | | AAAACGGAAAAATTTATCTTTTTGAAATTAAAAGCAAAGATAGCAATT |
| | | TGAAAAACGGCAAAGAGAAAACCTCGGCAAAGGACCTGCAAACAATT |
| | | TACTGGAACAGGATTTTTAGTGATATTGAAAACAAACCAAAGTTAAAT |
| | | GGGGAGGCGGAGATTTTCTACCGTCCGGCCTTGGAGGGAAAAAATCT |
| | | AAAAAGGAAAAAGTGGAAGAATAAGGAAATTATTGAAAATTTTCGTT |
| | | TTAGTAAGGAAAAATTTATTTTCCATTGCCCAATTACATTGAATCCTTG |
| | | CCTGAAAAATAAAAGAATTAATGATTTAGTGAATCAAGTTATTGTAGA |
| | | AACCAAAAACCAGCTATTTCTCGGAATTGACAGAGGCGAAAAAAACC |
| | | TTGCTTACTATTCTCTTGTAAATCAAAGGGGAGAAATTTTAGAGCAGG |
| | | GTAGTTTTAATATAATAAATAAGCAAAATTATTGGGAAAAGTTGGACA |
| | | TAAAACAAGGCGATCGCGACTTGGCGCGCAAAAATTGGACGACAATC |
| | | GGCAATATAAAAGATTTAAAAGATGGATATATTTCGCAAGTTGTAAGA |
| | | AAAATTGTCGATTTGGCGGTTTACAACGAGGGCGACAGGAAAAAAGG |
| | | TTTTCGCGAAACTCCCGCGCTTATTATTCTTGAGGATTTAAATATCGGC |
| | | TTCAAGCGCGGGCGGCAGAAAATTGAAAAACAGGTTTACCAAAAACT |
| | | TGAACTTGCCTTGGCTAAAAAATTGAATTTTCTTGTTGATAAAAGCGC |
| | | TAAAGATGGGGAAATGGCTTCGGTTGATAATGCCTTGCAGTTTACTCC |
| | | GCCAGTTCATGATTTTAACGATATTAAAGGCAAGCAATTTGGGATTAT |
| | | GTTTTATACTAATCCAAGCTTTACCTCAGCCACTGATCCAATTACGGGC |
| | | TGGCACAAAACAATATCTATTAAAAAGGGGTCAGAAATTAAAGAGCA |
| | | AATTTTTGATTTATTCAGTGATTTTGGTTTTGATGGTAAGGATTATTAT |
| | | TTCAAATATAAAGACGCGAATATTGGTAAAGAATGGATTTTATATTCC |
| | | GGAAAAAATGGTGCGGAATTGGATAGATATCGCGATAAATTTTCAGA |
| | | AAAAGAGGGTAAGAAGCATTGGAGCCCGGATAGAATTGATATCGTTA |
| | | AAAATTTAGAAAATATTTTTAAGGGATTTGATAAAAATAAATCTTTCA |
| | | AAGAGCAGATTAAAGATGGTAAAGAATTGAATAAATTCGACAAAGAA |
| | | CGAACAGCTTGGGAAAGCTTAAGATTTGTTATTGATGTTATTCAACAG |
| | | ATCCGCAACACCGGAGAAGATGAAAAAGACAACGACTTTATTCTTTCT |
| | | CCCGTTAGGGGTGCGAGTGGTGACTTTTTTGACTCTCGTAAGATCAAA |
| | | AATGGTGCAAAACTCCCGCAAAATGGCGATGCTAACGGCGCGTATAA |
| | | TATTGCCCGCAAGGGAATTATTATGAGCGAACATATTAAAAGAAACG |
| | | CGGATTTGTTTGTGCGAAATGAAGAGTGGGATGCTTGGCTTGCGGGAG |
| | | AAAAAAATTGGGTAGATTATATGGCGAACAATCTTAAAATAAGGCAG |
| | | AAAACTGTTTAA |
| 495 | 452 | ATGAATACCATGACCCAGAGATCGCCTGTGTCCGGTGGAAAGAATCCC |
| | | GAAGGACAAAAGTCCGTGTTTGACAGCTTTACTCACAAATACGCATTG |
| | | TCGAAGACATTGCGGTTTGAGTTGGTGCCGCAAGGCAAAACTTCCGAA |
| | | TCCTTAAAAGCTGTTTTTGAAGAAGATAAAAAAGTCGAGGAAAACTAT |
| | | CAAAAGACCAAGGTGCGATTGGACCAATTACATCGTTTGTTTGTGCAA |
| | | GCGTCTTTTACAGAATCAAAAGTCAGTGCGTTAAAACTTGCAAGTTTT |
| | | GTACGTGCATATAACGCCCTTATCGGTGTTGCCAAAAAGACACAAACG |
| | | AAAGAACAGAAGAGCGCATATGAGAAAGAAAGAAAAGCTCTTTTGTA |
| | | CGAGGTCGCAGGTCTCTTTGATGAGATGGGCGATGAGTGGAAGGCAC |
| | | AATATGAAGAAATAGAATCCGTTGGGCGCACAGGCAAGCAAAAGAAA |
| | | ATCAAGTTCTCATCTACAGGCTGTAAAATTCTCACTGACGAAGCGGTG |
| | | TTGAATATCCTAATGGATAAGTTTGCTGAAGATACACAAGTGTTTTCG |
| | | ACATTCTTTGGATTCTTCACATATTTTGGAAAGTTTAACGAGACGCGA |
| | | GAGAATTTCTACAAGAGTGACGGTACGAGCACGGCGGTGGCTACACG |
| | | TGTAGTCGAAAATCTCGAAAAGTTTTTGCGCAATAAACACATCGTTGA |
| | | ATCCGAGTATAAGAAAGTAAAAACCGCTATCGGACTCACTGATTCCGA |
| | | GATTCTTGCGCTGACCGATGTTGAGGCCTATCATCGTTGTTTTTTGCAA |
| | | GCCGGAATCGATGTTTACAATACTGTTCTTGGAGGCAGTACCGAGCTT |
| | | GAGCAAAGTGTGAATAAAAAAGTAAACGAATACCGTCAGAAAACTGG |
| | | AAACAAAATCAGTTTTTTGGCAAAATTACACAATCAAATTTTGAGTGA |
| | | AAAAGACGTGTTTGAGATGCTCGTGATAAAAGGTGATGCCCAACTCTG |
| | | GGAGAAACTAAAGGTATTTTCTGAAGAAAATGTCGCCTACTGCACGA |
| | | AGATGTTGGCGCTCATTCGTGACGCACTTACTATGCCAGAAAAAAGTG |
| | | GGTATGAGTGGTCAAAAATATATTTCTCCAGTGGTGCGATCAATACGA |
| | | TTTCGAGTAAGTACTTCACAAACTGGAGTGTACTCAAGGGCGCACTTC |
| | | TCGATGCGGTTGGCACGGCGAAGGGTGGAGGTGGGGAGTTACCTGAT |
| | | TTTGTGTCCCTTCAACACGTACAGAATGCTCTCGATGTGAACGAAATA |
| | | AATAAAGGGAAGAAACCGAGTGAGTTGTTCAGGTCAGAGATATTGAA |
| | | ACATGCAGCATTTGTCGAGAGTGTCGGGCACTTTACAAACCTCATTAC |
| | | AATACTCTTGAGTGAACTTGATGCGCGTGTTGCCGAAAGTGCAGTTGA |
| | | TTTGGCGGACCTCAAAAAAGATTCCTTTTGGACAACGGGCGCACTTTC |
| | | GCAGAGGCGTAAGGAAAAAGAAGATGAGGGGACAATTCAGATCAATC |
| | | GTATCAGCGCGTACCTTAATAGCTGTCGCGATGCGCATCGTATGATCA |
| | | AATACTTTGCGACGGAAAACAGGAGAGATTGGGTTGAGCCAGAAGAG |
| | | GGTTACGACCCAAAATTCTACGATGCCTATCGCGAAGAATATGCGAAA |
| | | GACATTTTCTTTCCGCTCTACAATGTAGCGCGCAATTTTCTCACTCAAA |
| | | AACCATCCGATGAAAACAAAGTCAAACTCAACTTCGAATGTGGCACC |
| | | CTTCTTTCCGGGTGGGACAAAAACAAAGAGCAAGAGAAGCTGGGCAT |
| | | TATTCTGCGAAAAGACGGCGCTTATTATCTTGCGATAATGCGTAAACA |
| | | GTTTAGTGACATACTGGAGGAGAAGAAACACCCCGAAGCGTATCGAG |
| | | CAGGTGATAATGGATATTCAAAAATGGAATACAAACTGTTTCCAGATC |
| | | CAAAGCGCATGATTCCCAAGGTGGCTTTCGCGGAAACCAACAAAAAA |
| | | ACGTTTGGATGGACACCAGAAGTGCAGGCGATTAAAGATGAGTATGC |
| | | CAAGTTCCAAGAGTCAAAAAAGGAAGATCAGAGTGCGTGGAAAAATC |
| | | AGTTTGATGCGAATAAAACTGCCAGACTAATTGCGTACTATCAAAACT |
| | | GTCTCGCCAAAGGTGGTTACCAAGAGACGTTTGGACTCACATGGAAG |
| | | AAACCAGAGGAATATGTGGGTATCGGTGAATTTAATGACCACATTGCA |
| | | CAGCAAAATTACAAGATAAAGTTTGTTCCAGTAGATGCGGACTACATT |
| | | GATGAGCATGTTGCAAAAGGAGAGATGTATTTGTTCAAAATTAAAAG |
| | | CAAAGACTTTGCGAGCGGATCAACGGGTACTAAAAATGTGCATTCACT |
| | | CTACTTCTCACAACTCTTTTCCGAAGCAAATCTCGCACAGACACCGAC |
| | | TGTGGTACAACTCGCCGGAAATGCGGAGATTTTTTACCGCGAGGCATC |
| | | GGTGGAGCCGGAAAAAGAAAAACGCAACTTCCCGCGAGACATCACCA |
| | | AATACAAACGTTTTACCGAAGACAAGGTATTCTTCCATGTGCCAATCA |
| | | AGATCAACGCGGGGACGGATGCAATGCGTAGCCAATATCAATTCAAT |
| | | AAGATACTCAATGCCGAGCTTATCGCGAAGCGCGCAAAAGACTTTTGC |
| | | ATCATCGGCATTGATCGCGGGGAAAAGCATCTCGCATACTATTCAGTG |
| | | ATCAATCAAAAAGGTGTGATTGTCGACGAAGGGAGTCTAAATGAGAT |
| | | TAGCGGCACCGACTATCACAAGCTTCTTGATGGCAAGGAGAAAGAAC |
| | | GTACTGCCAATCGCCAAGCATGGTTACCGGTGCGCCAGATCAAAGACC |
| | | TCAAGCGTGGATATGTATCGCATGCTGTCAAAAAGATTTGCGACCTCG |
| | | CCATAGAACACAACGCGATTATCGTGCTCGAAAATCTCAACATGCGTT |
| | | TCAAACAAATTCGTAGTGGTATTGAAAAGAGTGTATACCAACAGCTCG |
| | | AAAAGCAACTCGTAGACAAGCTCGGTCACATGGTGTTCAAAGACAGG |
| | | CCGGAGCTTGAAATAGGCGGTGTCCTAAACGGTTATCAACTCGCCGCG |
| | | CCGTTTGAGTCGTTCAAAGACATGGGTAATCAGACCGGTATCGTCTTC |
| | | TACACTGAAGCAGCATACACGTCGACGACAGATCCTGTCACCGGATTC |
| | | CGTAAGAATGTGTATGTCAGTAACTCAGCTACCAAAGAGAAGTTAGA |
| | | AAAAGCAATTAAATCTTTCGATGCTATTGGTTGGAACGAAGAAAGGC |
| | | AAAGCTACTTTATCACTTACGATCCAGTTAGACTTGTAGATAAGAAGG |
| | | AGAAAACTAAAACGATATCGAAATTATGGACGGTATATGCAGATGTG |
| | | CCACGTATTCGTCGCGAGAGAAACGAACAAGGTGTTTGGAATGCTCG |
| | | GAATGTAAATCCGAACGATATGTTCAAGTCTCTGTTTGAGGCGTGGAA |
| | | TTTTGAGGACAAAATAGCGACCGACCTAAAAAGTAAGATCGAGGAAA |
| | | AGATGAAAAATGGAGAACTCAGCAGCTATAAGATGATTGACGGGCGA |
| | | GAAAGGAACTTCTTCCAGGCATTCATCTATATCTTCAATATCATTCTCG |
| | | ATATCCGAAATTCGTCTGATAAGACCGACTTCATTGCATCACCCGTTG |
| | | CTCCATTCTTCACAACCCTCAATGCGCCAAAGCCAAATCCATGTGACA |
| | | TCAATCTGGCGAATGGCGACTCTCTCGGCGCCTACAACATTGCTCGAA |
| | | AGGGTATTATCACCATTGGCCGTATAAATGATAATCCAGAAAAACCGG |
| | | ATTTATACATCAGTAAAGAACAGTGGGACGAATGGGCAACTAAACAC |
| | | GGAATACAACTATGA |

TABLE S14D
Direct Repeat Group 14

| SEQ ID NO | Direct Repeat (Variant #1) | SEQ ID NO | Direct Repeat (Variant #2) |
|---|---|---|---|
| 500 | ATCTACAACAGTAGAAATTCCCTAT | 501 | CTACAACAGTAGAAATTCCCTATAA |
| | AACGATTTGGC | | CGATTTGGC |
| 502 | GGCTATAAGCCCTCAATAATTTCTA | 503 | GGCTATAAGCCCTCAATAATTTCTA |
| | CTATCGTAGAT | | CTATCGTAGAT |
| 504 | GTCTAGTAAAGACATGTAATTTCTA | 505 | GTCTAGTAAAGACATGTAATTTCTA |
| | CTATTGTAGAT | | CTATTGTAGAT |
| 506 | ATCTACAATAGTAGAAATTAATAGT | 507 | ATCTACAATAGTAGAAATTAATAGT |
| | ATCTCTTAAAG | | ATCTCTTAAAG |
| 508 | ATCTACAATAGTAGAAATTAAATTA | 509 | ATCTACAATAGTAGAAATTAAATTA |
| | GTCTTATAGAC | | GTCTTATAGAC |
| 510 | ATCTACAATAGTAGAAATTAAATGT | 511 | ATCTACGATAGTAGAAATTATATAT |
| | GTCTTTTAGAC | | TCTTATTAAAC |
| 512 | GGCTACTAAGCCTTTATAATTTCTA | 513 | GCTACTAAGCCTTTATAATTTCTACT |
| | CTATTGTAGAT | | ATTGTAGAT |
| 514 | GTCTATATGACTAAGTAATTTCTAC | 515 | GTCTATATGACTAAGTAATTTCTAC |
| | TATGTGTAGAT | | TATGTGTAGAT |
| 516 | GGCTAAAGCTCTTTAAGAATTTCTA | 517 | GGCTAAAGCTCTTTAAGAATTTCTA |
| | CTGTTGTAGAT | | CTGTTGTAGAT |
| 518 | ATCTACAATAGTAGAAATTATTTGA | 519 | ATCTACAATAGTAGAAATTATTTGA |
| | GCCTCTTAGGC | | GCCTCTTAGGC |
| 520 | GAATAATAATCCCTTTAAATTTCTA | 521 | GAATAATAATCCCTTTAAATTTCTA |
| | CTATTGTAGAT | | CTATTGTAGAT |
| 522 | ATCTACAACAGTAGAAATTGAGGTT | 523 | ATCTACAACAGTAGAAATTGAGGTT |
| | CGTTGGTCAAC | | CGTTGGTCAAC |
| 524 | ATCTACACACAGTAGAAATTATTTA | 525 | ATCTACACACAGTAGAAATTATTTA |
| | GGTTACTTAAC | | GGTTACTTAAC |
| 526 | ATCTACATAAGTAGAAATTCTTATA | 527 | ATCTACATAAGTAGAAATTCTTATA |
| | AGTTGTTAGCC | | AGTTGTTAGCC |
| 528 | CTCTAATAGGCATATTCAATTTCTA | 529 | TCTAATAGGCATATTCAATTTCTAC |
| | CTTTTGTAGAT | | TTTTGTAGAT |
| 530 | GTTTTAAGGACTTAGAGAATTTCTA | 531 | GTTTTAAGGACTTAGAGAATTTCTA |
| | CTGTTGTAGAT | | CTGTTGTAGAT |
| 532 | ATCTACAAAAGTAGAAATTAGATA | 533 | ATCTACAACTAGTAGAAATTTTATT |
| | TTATGTTTAAAC | | ATTTTTAATCA |
| 534 | ATCTACAAAAGTAGAAATTAGATA | 535 | ATCTACAACTAGTAGAAATTTTATT |
| | TTATGTTTAAAC | | ATTTTTAATCA |
| 536 | GTCTAACGACCTTTTAAATTTCTAC | 537 | CTAACGACCTTTTAAATTTCTACTGT |
| | TGTTTGTAGAT | | TTGTAGATAT |
| 538 | CTCAAAACTCATTCGAATCTCTACT | 539 | TCAAAACTCATTCGAATCTCTACTC |
| | CTTTGTAGAT | | TTTGTAGAT |
| 540 | ATCTACAATAGTAGAAATTCAATGA | 541 | ATCTACAATAGTAGAAATTCAATGA |
| | GGCTGTTAGCC | | GGCTGTTAGCC |

TABLE S14E
crRNA Sequences Group 14

| SEQ | | |
|---|---|---|
| ID | | |
| NO | Sequence | FIG |
| 542 | GCCAAAUCGUUAUAGGGAAUUUCUACUGUUGUAGAU | FIG. 14A |
| 543 | GGCUAUAAGCCCUCAAUAAUUUCUACUAUCGUAGAU | FIG. 14B |
| 544 | GUCUAGUAAAGACAUGUAAUUUCUACUAUUGUAGAU | FIG. 14C |
| 545 | CUUUAAGAGAUACUAUUAAUUUCUACUAUUGUAGAU | FIG. 14D |
| 546 | GUCUAUAAGACUAAUUUAAUUUCUACUAUUGUAGAU | FIG. 14E |
| 547 | GUCUAAAAGACACAUUUAAUUUCUACUAUUGUAGAU | FIG. 14F |
| 548 | GUUUAAUAAGAAUAUAUAAUUUCUACUAUCGUAGAU | FIG. 14G |
| 549 | GCUUAAUGCUUAUAUUAAAUUUCUACUAUUGUAGAU | FIG. 14H |
| 550 | GUCUAUAUGACUAAGUAAUUUCUACUAUGUGUAGAU | FIG. 14I |
| 551 | GGCUAAAGCUCUUUAAGAAUUUCUACUGUUGUAGAU | FIG. 14J |
| 552 | GCCUAAGAGGCUCAAAUAAUUUCUACUAUUGUAGAU | FIG. 14K |
| 553 | GAAUAAUAAUCCCUUUAAAUUUCUACUAUUGUAGAU | FIG. 14L |
| 554 | GUUGACCAACGAACCUCAAUUUCUACUGUUGUAGAU | FIG. 14M |
| 555 | GUUAAGUAACCUAAAUAAUUUCUACUGUGUGUAGAU | FIG. 14N |
| 556 | GGCUAACAACUUAUAAGAAUUUCUACUUAUGUAGAU | FIG. 140 |
| 557 | CUCUAAUAGGCAUAUUCAAUUUCUACUUUUGUAGAU | FIG. 14P |
| 558 | GUUUUAAGGACUUAGAGAAUUUCUACUGUUGUAGAU | FIG. 14Q |
| 559 | GUUUAAACAUAAUAUCUAAUUUCUACUUUUGUAGAU | FIG. 14R |
| 560 | UGAUUAAAAAUAAUAAAAUUUCUACUAGUUGUAGAU | FIG. 14S |
| 561 | GUCUAACGACCUUUUAAAUUUCUACUGUUUGUAGAU | FIG. 14T |
| 562 | CUCAAAACUCAUUCGAAUCUCUACUCUUUGUAGAU | FIG. 14U |
| 563 | GGCUAACAGCCUCAUUGAAUUUCUACUAUUGUAGAU | FIG. 14V |

### Group 15 Sequences

TABLE S15A
Enzyme Sequences Group 15

| SEQ ID NO | Ref. | Group | Sequence |
|---|---|---|---|
| 334 | ID405 | 10 | MARIIDEFCGQMNGYSRSITLRNRLVPIGKTEENLKQFLEKDLERATA |
| | | | YPDIKNLIDAIHRNVIEDTLSKVALNWNEIFNILATYQNEKDKKKKAAI |
| | | | KKDLEKLQSGARKKIVEAFKKNPDFEKLFKEGLFKELLPELIKSAPVD |
| | | | EIAVKTKALECFNRFSTYFTGFHDNRKNMYSEEAKSTAISYRIVNENF |
| | | | PKFFANIKLFNYLKEHFPRIIIDTEESLKDYLKGKKLDSVFSIDGFNSVL |
| | | | AQSGIDFYNTVIGGISGEAGTKKTQGLNEKINLARQQLSKEEKNKLRG |
| | | | KMVVLFKQILSDRETSSFIPVGFANKEEVYSTVKEFNNSIAEKAVSKV |
| | | | RDLFLHREEFTLNEIFVPAKSLTDFSQAIFGSWSILSEGLFLLEKDSMK |
| | | | KALSESQEEKINKEIAKKDCSFTELQLAYERYCTEHNLPVEKFCKDYF |
| | | | DIVDYRGNGAKSEKTKVSILSEILETFLQLDFDHIQDLQQEKNAAIPIK |
| | | | AYLDEVQNLYHHLKLVDYRGEEQKDSTFYSKHDEILTDLSQIVPLYN |
| | | | KVRNFVTKKLGESKKIKLNFDCPTLANGWDENQESSNDAIILRKDGK |
| | | | YYLGIYNPNNKPKFAKKDSIVGDCYEKMAYKQIALPMGLGAFVRKCF |
| | | | GTAQKYGWGCPENCLNSEGKIIIKDEEAKGNLEAIIDCYKDFLNKYEK |
| | | | DGFKYKDYNFSFLDSASYEKLSDFFNDVKPQGYKLSFTSIPLSEIDKMI |
| | | | DEGKLFLFQIYNKDFAKKATGKKNLHTLYWENLFSVENLQDVVLKL |
| | | | NGEAELFWREASIKKDKVIVHKKGSILVNRTTTDGKSIPEAIYQEIYQL |
| | | | KNKMADSISDEAKRLLESGTVVCKVATHDIVKDKHFTENTYLFHCPIT |
| | | | MNFKAKDRTNKEFNNHVLEVLNKNPDIKVIGLDRGERHLLYLSLINQ |
| | | | KGEIECQKTLNLVEQVRNDKTVSVNYHEKLVHKEGSRDAARKNWQT |
| | | | IGNIKELKEGYLSAVVHEIASLMVKHNAIVVMEDLNFGFKRGRFAVE |
| | | | RQIYQKFENMLIEKLNYLVFKDRKVTEPGGVLNAYQLANKSAKVTD |
| | | | VYKQCGWLFYIPAAYTSKIDPRTGFANLFITKGLTNVEKKKEFFGKFD |
| | | | SIRYDATESCFVFSFDYAKICDNADYKKKWDVYTRGTRLVYNKTERK |
| | | | NVSVNPTEELQCVFDEFGIKWNTGEDLIESISLIPAEKSNAKFFDVLLR |
| | | | MFNATLQMRNSVPNTDTDYLVSPVKAEDGSFFDSREEFKKGGDARLP |
| | | | IDCDANGAYHIALKGLYLLLNDFNRDNKGVIQNISNKDWFKFVQEKV |
| | | | YKD |
| 58 | ID414 | 5 | MKEQFINCYPLSKTLRFSLIPVGKTEDNFNKKLLLESDKQRAENYENV |
| | | | KSYIDRFHKEYIKSALANARIEKINEYAALYWKNNKDDSDAKAMESL |
| | | | EDDIRKQISKQLTSTANFKRLFGKELICEDLPAFLTDENEKETVECFRS |
| | | | FTTYFNGFNTNRKNMYSSEKKSTAIAYRCVNDNLPRFLDNIKTFQKIF |
| | | | DNLSDETITKLNTDLYNIFGRKIEDIFSVDYFDFVLTQSGIDIYNYMIGG |
| | | | YTCSDGTKIQGLNECINLYNQQVAKNEKSKRLPLMKPLRKQILSEKDS |
| | | | VSFIPEKFNSDNEVLLAIEEYYNNHISDIDSLTELLQSLNTYNANGIFIK |
| | | | SGAAVSDISNAAFNSWNVLRLAWNEKYEALHPVTSTTKIDKYIEKRD |
| | | | KVYKSIKSFSLFELQELGAENGNEITDWYISSINECNRKIKETYLQARE |
| | | | LLESDYEKDYDKRLYKNEKATELVKNLLDAIKEFQQLVKLINGTGKE |
| | | | ENKDELFYGKFTSLYDSVADIDRLYDKVRNYITQRPYSKDKIKLNFDN |
| | | | PQLLGGWDKNKESDYRTVILRKNDFYYLAVMDKSHSKVFVNAPEITS |
| | | | EDEDYYEKMEYKLLPGPNKMLPKVFFASRNIDKFQPSDRILDIRKRES |
| | | | FKKGATFNKSECHEFIDYFKESIKKHDDWSKFGFEFSPTESYNDISEFY |
| | | | REVSDQGYYISFSKISKNYIDKLVENGYLYLFKIYNKDFSKYSKGTPNL |
| | | | HTLYFKMLFDERNLSNVVYKLNGEAEMFYREASINDKEKITHHANQP |
| | | | IKNKNPDNEKKESVFEYDIVKDKRFTKRQFSLHVSVTINFKAHGQEFL |
| | | | NYDVRKAVKYKDDNYVIGIDRGERNLIYISVINSNGEIVEQMSLNEIIG |
| | | | DNGYSVDYQKLLDKKEKERDKARKNWTSVENIKELKEGYISQVVHK |
| | | | ICELVVKYDAVIAMEDLNFGFKRGRFPVEKQVYQKFENMLISKLNLLI |
| | | | DKKAEPTETGGLLRAYQLTNKFDGVNKAKQNGIIFYVPAWDTSKIDP |
| | | | VTGFVNLLKPKYTSVREAKKLFETIDDIKYNTNTDMFEFCIDYGKFPR |
| | | | CNSDFKKTWTVCTNSSRILSFRNEKKNNEWDNKQIVLTDEFKSLFNEF |
| | | | GIDYTSDLKASILSISNADFYNRLIRLLSLTLQMRNSIIGSTLPEDDYLIS |
| | | | PVANDRGEFYDSRNYKGSNAALPCDADANGAYNIARKALWAINVLK |
| | | | DTPDDMLQKAKLSITNAEWLEYTQR |
| 564 | ID418 | N/A | MKAELFKTFVDEYPVSKTLRFSLIPVGRTLENIEKDGILDCDEKRSEEY |
| | | | KRVKKLLDEYYKTFIEHALTNVELDINSLEEYERLYNIKNKSDKEKAD |
| | | | FDSVQKNLRKQIVKALKEDEKYKFLFKKEIIEKELVDFLNGRDSDVEL |
| | | | VKSFKGYATMFQGFWDARKNIFSDEEKSTAIAYRIINENLPKFISNKNI |
| | | | YFTKIQPEMDAELDQLTLSNNSNEIRDIFKLEYFSKTITQTGIEIYNGIL |
| | | | GGYTIDEQVKLQGINEIVNLHNQKNKDSGKIPKLKMLYKQILSDTNTL |
| | | | SFIAEGFETDDEVLESLNIFYDVFNENILDEDLGIINLLRNIDKFSYDGIY |
| | | | IKNDKALIDISNYLFGDWHYIKNAINKKYEIDNPGKNTEKYIVKRNKFI |
| | | | KSFDSFSLKYLQDCTGSKFNEHILIKINNLIDDVKKAYNSVALLIKNKY |
| | | | EGTNLINDKDAIEKIKQFLDSMKSLVSFIRCFEGTGQEPDRDEIFYGEF |
| | | | DTGKKTFYYLNNIYNKTRNYVTKKPYSIEKYKLNFDNAELLTGWDLN |
| | | | KETSKASIILKKDNLYYLGIMKKSDRRVFLNVPETESTYNCYEKMEYK |
| | | | LLPGPNKMLPKVFFAKSNIDYYDPSPEIMRIYKEGTFKKGDNFNIDDC |
| | | | HDLIDYFKESLDKNDDWKIFDFDFSETSSYKDIGEFYKEVQQQGYKIS |
| | | | FKNIASSYVDELVENGKLYLFQIYNKDFSKNSKGTENLHTMYWRALF |
| | | | DEENLENVIYKLNGDAEIFFRRKSISENEKIVHPAHVEIENKNDETRKE |
| | | | KKTSIFNYDIIKDKRFTVDKFQFHVPITLNFQAIDRKSDINLRMRQEIKK |
| | | | NKDMHIIGIDRGERNLLYISIIDLDGNIVKQESLNTITNEYDGKIYTTDY |
| | | | HKLLDKKEEKRKVARQTWNTIENIKELKAGYMSQVVHKITQLMMEY |
| | | | NAIVVLEDLNTGFKRGRQKVEKQIYQAFEKALINKLNYYVDKKVDK |
| | | | NEISGLYKPLQLTKEFESFKKLGKQSGAIFYVPAWNTSKMDPTTGFVN |
| | | | LLSVKYENMEKSKEFINKIKDINFKEDDCGKYYEFHIDFNEFTDKGKD |
| | | | TKTDWNICSFGKRIDNARNQKGDFESKMIDLTNEFHNLFKKYGINDN |
| | | | SNLKEDILNVKEAKFYKEFINLFKLMLQIRNSESNEKVDFLQSPVKNN |
| | | | KGEFFNSNNVNGNEAPENADANGAYNIARKGLWIVNQIKTMPDSQM |
| | | | HKIKLAMKNQEWLLFAQKGNV |
| 335 | ID406 | 10 | MATIENFCGQENGYSRSITLRNKLIPIGKTANNLKQFLEKDQERADVY |
| | | | PEIKKLIDEIHRGFIEDTLSKFSFVWEPLFDDFELYQNEKDKSKKATKK |
| | | | KDLEKFQSGARKKIVEAFKKHPDYDKLFKDGLFKELLPALIKNSSDSE |
| | | | ISNKEEALKVFDRFSTYFVGFHENRKNMYSEEDKSTAISYRIVNENFP |
| | | | KFYANVKLYNYIKENFPKIISETEESLKNHLNGKRLDEIFNAESFNDVL |
| | | | AQSGIDFYNTVIGGISTETEKVQGLNEKINLARQKLPAEEKNKLRGKM |
| | | | VVLFKQILSDRGTSSFIPVGFNNKEEVYSSVKSFNDEFVNISVCETKEL |
| | | | FKQVAEFNLSEIYVPAKSLTNFSQNIFGSWSILTEGLFLLEKDKVKKAL |
| | | | SENKEEKINKEIAKKDYSLDELQVAYERYCNEHNFSVEKNCKDYFDV |
| | | | VDYRSENEKSDKKKISILSAITESYSKIDFENIHDLQQEKEAATPIKTYL |
| | | | DEVQNLYHHLKLVDYRGEEQKDSNFYSKLDEIITQLSEIIPLYNKVRN |
| | | | FVTKKPGEMKKIKLNFDCPTLANGWDENKESSNDAIILRKDGKYYLG |
| | | | IFNPNNKPKFSKIENISESYYEKMVYKLLPGPNKMLPKVFFSTKGQETF |
| | | | LPPKDLLLGYDAGKHKKGDAFDKEFMYKLIDWFKDAINRHEDWKKF |
| | | | NFVFSPTKSYEDMSGFYREVELQGYKVSFQKISDTEINSFVSNGKLFLF |
| | | | QIYNKDFALKASGKKNLHTLYWENLFSEENLKDVCLKLNGEAELFW |
| | | | RKPSLNKEKVTVHEKGSILVNRTTNDGKSIPEDIYQEIYQFKNKMKDK |
| | | | ISDNISIQNDDGKVITITVTLENKQKEKFTENYKVVYKTATHYITKDNR |
| | | | FTEDTYLFHCPITMNFKAPDKSNKEFNNHVLEVLSGNPNVKIIGLDRG |
| | | | ERHLIYLSLINQKGEIELQKTLNLVEQVRNDKTVKVNYQEKLVHKED |
| | | | DRDKARKSWQTIGNIKELKEGYLSNVVHEIAKMMVEHNAIVVMEDL |
| | | | NFGFKRGRFAVERQIYQKFENMLIEKLNYLVFKDKKVTEPGGVLNAY |
| | | | QLTNKSANVSDVYRQCGWLFYIPAAYTSKIDPKTGFANLFITKGLTNV |
| | | | EKKKEFFDKLDSIRYDSKEDCFVFGFDYGKICDNADFKKKWEVYTKG |
| | | | ERLVYNKTERKNININPTEELKSIFDDFGINWNNEENFIDSVHTIQAEK |
| | | | SNAKFFDTLLRMFNATLQMRNSIPNTEIDYLISPVKSEDGTFFDSREEL |
| | | | KKGENAKLPIDADANGAYHIALKGLYLLENDFNRNDKGVIQNISNAD |
| | | | WFKFVQEKEYRD |
| 331 | ID411 | 10 | LLFIIEFEEKIMKTIENFCGQKNGYSRSITLRNRLIPIGKTEENIEKLQLL |
| | | | DNDIKRSKAYVEVKSMIDDFHRAFIEEVLSKAKLEWGPLYDLFDLFQ |
| | | | NEKDKHKKSKIKKELETIQGVMRKQIVKKFKDDDRFDKLFKKEILTEF |
| | | | VPTVIKADESGTISDKRAALDVFKGFATYFTGFHQNRQNMYSEEAKA |
| | | | TAISNRIVNENFPKFYANVKVFECLQKEYPAIITETEEALSEILNGKKLA |
| | | | DIFSADGFNSVLSQSGIDFYNTIIGGIAGEAGTQKLQGINEKINLARQQL |
| | | | PTEEKNKLKRKMSVLYKQILSDRSTASFIPIGFESSDEVYESVKQFKEQ |
| | | | SLDNVISAAKELFEKSDYDLSQIYVPAKEVTDFSLKLFGNWSILHDGL |
| | | | FLIEKDNSKKTFTEKQIENLRKEIAKTDCSLADLQNAYERWAKENDV |
| | | | KAEKTVKNYFKIAELRADGKSREKTSVEILNKIESTFEKIDFEKRDNLI |
| | | | KEKETATPIKEFLDEVQNLYHYLKLVDYRGEEQKDTDFYSKYDEILQ |
| | | | TLSEIVPLYNKVRNFVTKKPNEVKKVKLNFDNVSLAKGWDVNKESD |
| | | | YTCILLRRSGLYYLGVLNPKDKPKFDSENNGETSINKNDCYEKLVYK |
| | | | YFKDVTTMIPKCSTQLNDVKQHFKNSNEDYILENNNFIKPLVISKRIFD |
| | | | LNNKTFDEKKMFQIDYYRNTGDLKGYTEAVKDWISFCMTFVHSYKS |
| | | | TCIYDFSSLGDCSQFKQVDQFYKEINLLLYKIWFVNVTAEKINSLVDS |
| | | | GKLFLFQIYNKDYSTGKDGGNGSTGKKNLHTMYWENLFSEENLRDV |
| | | | CLKLNGDAELFWRDANPDVKDVCHKKGSVLVNRTTSDGETIPEEIYQ |
| | | | EIYKFKNPNKQEKSFKLSDTAKELLDSGKVGFKEAKFDIIKDRHFTQK |
| | | | TYLFHCPITMNFKAPEITGRKFNEKVQQVLKNNPDVKVIGLDRGERHL |
| | | | IYLSLINQKGEIELQKTLNLVEQVRNDKTVSVNYQEKLVQKEGERGK |
| | | | ARKNWQTISNIKELKEGYLSNIVHEIAKLMVENNAIVVMEDLNFGFK |
| | | | RGRFAVERQVYQKFENMLIEKLNYLVFKDKKVAEPGGVLNAYQLTD |
| | | | KVANVSDVGKQCGWIFYIPAAYTSKIDPKTGFANLFYTAGLTNIEKKK |
| | | | DFFDKFDSIRYDRKTDSFVFTFDYSDFGDNADFKKKWELYSRGERLV |
| | | | FSKAEKSVVHVNPTENLKALFDKQGINWSSEDNIIDQIQAVQAERENC |
| | | | AFYDGLYRSFTAILQMRNSVPNSSKGEDDYLISPVMAEDGSFYDSREE |
| | | | AEKGKTTDGKWISKLPVDADANGAYHIALKGLYLLQNNFNLNENGY |
| | | | IENISNADWFKFVQEKEYAK |
| 20 | ID415 | 2 | MEMRLMVVFEDFTKQYQVSKTLRFELIPQGKTLENMERAGIVKGDC |
| | | | QRSEDYQEAKKIIDKIYKHILNSSMAKVEIDWSTLAEATKEFRKNKDK |
| | | | KKYENVQVRVRKKLLEDIKNQTITVEKGAKDLYKAMFEKEIVTGEVC |
| | | | AAFPEIDLTDEEKAILDKFKKFTTYFTGFFENRKNIFTDEGISTSFTYRL |
| | | | VNDNFIKFYDNCNLYKDIIASVPGLKGEFKKCFKDLQLFSKCRLEEIFE |
| | | | TSFYNHILTQDGIDEFNQLLGGISAKEGEKKKQGLNEVINLAMQKDEG |
| | | | IRNKLRYRAHKFTPLFKQILNDRSTLSFIPETFENDRKVLESIEAYKLYL |
| | | | SEQNILEKAQELLCSMNRYDSRKLSIDGKYISKLSQAIFNSWSKIHDGI |
| | | | KDYKKSLLPKETKKALKGIDMELKQGVSVQDILDALPEENFHEVIVD |
| | | | YTHNLVQKCQAVLSGSLPGNIETDKDKTDIKLVMDPLLDLYRFLEIFS |
| | | | HDNSQGVKTAFEEQLMEILADMKEIIPLYNKVRNFATKKAYSVEKFK |
| | | | LNFNVATLASGWDQNKENANCAIILRKKDMYYLGIYNSSNQPFFEIVE |
| | | | QDDDGFEKMIYKQFPDFNKMLPKCTVSRKNDVAVHFNKSDADFLLN |
| | | | VNTFSKPLLITKEVYDLGTKTVQGKKKFQIDYKRNTGDEAGYKAALK |
| | | | AWIDFGKEFIKAYESTAIYDISLLRKSEDYPDIQSFYKDVDNICYKIAFQ |
| | | | KISDEAVNQCVENGSLYLFKLHAKDFSPGASGKPNLHTLYWKYVFEE |
| | | | ENLKDVVVKLNGQAELFYRPRSLTQPVVHKKGEKILNKTTRSGEPVP |
| | | | DDVYVELSHFIKNGSTGNLSNEAKKWQAKVSVRNVPHEITKDRRFTQ |
| | | | DKFFFHVPLTLNYKSANTPRRFNDLVKAYIKKNPDVHVIGIDRGERNL |
| | | | IYAVVIDGKGKIVEQRSFNIVGGYNYQEKLWQKENERQAARRDWTA |
| | | | VTTIKDLKQGYLSAVVHELSKMIVKYKAIVVLENLNAGFKRMRGGIA |
| | | | ERSVYQQFEKALIDKLNYLVFKDAVPAVPGGVLNAYQLTDKFDSFSK |
| | | | MNQQTGFLFYVPAAYTSKIDPLTGFVDCFNWKQIKKNTESRKAFIGLF |
| | | | ESLCYDANTNNFVLHYRHKANRYVRGGNLDITEWDILIQENKEVVSK |
| | | | TGKSYRQGKRIIYRKGSGNHGEASPYYPHEELQSLLEEHGISYKAGKN |
| | | | ILPKIKAANDNALVEKLHYIIKAVLQLRNSNSETGEDYISSPVEGRKD |
| | | | WCFDSRAADDALPQDADANGAFHIAMKGLLLMKRIRNDEKLAISNE |
| | | | DWLNYIQGLRS |
| 445 | ID419 | 14 | MPNISEFSEHFQKTLTLRNELVPVGKTLENIISSNVLINDEKRSEDYKK |
| | | | AKEIIDSYHQEFIEKSLSSVTVDWNDLFSFLSRKEPEDYEEKQKFLEEL |
| | | | ESIQLEKRKSIVNQFEQYDFGSYTDLKGKKTKELSFESLFKSELFDFLL |
| | | | PNFIKNNEDKKIISSFNKFTSYFTGFYENRKNLYTSAPLPTAVAYRIVN |
| | | | DNFPKFISNQKIFRVWKDNVPKFVEIAKTKLREKGISDLNLEFQFELSN |
| | | | FNSCLNQTGIDSYNELIGQLNFAINLECQQDKNLSELLRKKRSLKMIPL |
| | | | YKQILSDKDSSFCIDEFENDESAINDVISFYKKAVCENGPQRKLSELLR |
| | | | DLSSHDLDKIFIQGKNLNSISKNLFGGKNWSLLRDAIIAEKSKDKSYKK |
| | | | AIKTNPSSDDLDRILSKDEFSISYLSKVCGKDLCEEIDKFIKNQDELLIKI |
| | | | NSQAWPSSLKNSDEKNLIKSPLDFLLNFYRFAQAFSSNNTDKDMSLY |
| | | | ADYDVSLSLLVSVIGLYNKVRNYATKKPYSLEKIKLNFENPNLATGW |
| | | | SENKENDCLSVILLKNQIYYLGILNKSNKPNFSNGISQQPSSESCYKKM |
| | | | RYLLFKGFNKMLPKCAFTGEVKEHFKESSEDYHLYNKDTFVYPLVIN |
| | | | KEIFDLACSTEKVKKFQKAYEKVNYAEYRQSLIKWISFGLEFLSAYKT |
| | | | TSQFDLSNLRKPEEYSDLKEFYEDVDNLTYKIELVDLKEEYVDSLVEN |
| | | | GQLFLFEIRNKDFAKKSSGTPNLHTLYFKSIFDPRNLKNCIVKLNGEAE |
| | | | IFYRKKSLKIDDITVHQKGSCLVNKVFFNPDSGKSEQIPDKIYNNIYAY |
| | | | VNGKSTTLSKEDEFFYTKATIKKATHEIVKDKRFTVDKFFFHCPITINY |
| | | | KSKDKPTKFNDRVLDFLRKNEDINIIGIDRGERNLIYATVINQKGEIIDC |
| | | | RSFNTIKHQSSSVNYDVDYHNKLQERENNRKEEKRSWNSISKIADLKE |
| | | | GYLSAVIHEIALMMVKYNAIVVMENLNQGFKRIRGGIAERSVYQKFE |
| | | | KMLIDKLNYFVIKNENWTNPGGVLNGYQLTNKVSTIKEIGNQCGFLF |
| | | | YVPAAYTSKIDPSTGFVNLLNFNKYNNSDKRRELICKFYEICYVQNEN |
| | | | LFKFSIDYGKLCPDSKIPVKKWDIFSYGKRIVKEDLKTGYMKENPEYD |
| | | | PTEELKNLFTLMRVEYKKGENILETISIRDMSREFWNSLFKIFKAILQM |
| | | | RNSLTNSPVDRLLSPVKGKDATFFDTDKVDGTKFEKLKDADANGAY |
| | | | NIALKGLLILKNNDSVKTDKELKNVKKVSLEDWLKFVQISLRG |

TABLE S15B
Nucleotide Sequences Group 15

| SEQ | | | |
|---|---|---|---|
| ID | | | |
| NO | Ref. | Group | Sequence |
| 365 | ID405 | 10 | ATGGCTAGAATAATTGATGAGTTTTGTGGACAGATGAATGGGTATT |
| | | | CTCGTTCAATTACTTTGAGGAATAGGTTAGTTCCTATTGGGAAAAC |
| | | | TGAAGAAAATTTAAAGCAGTTTTTAGAAAAAGATTTGGAAAGAGC |
| | | | AACTGCTTATCCGGACATAAAAAATCTTATAGATGCTATTCATCGT |
| | | | AATGTAATTGAGGATACTTTATCCAAAGTTGCTTTGAATTGGAATG |
| | | | AAATATTCAATATACTTGCTACTTACCAAAATGAAAAAGATAAAA |
| | | | AAAAGAAAGCAGCAATAAAAAAGGATTTAGAGAAATTACAAAGT |
| | | | GGTGCAAGAAAAAAAATAGTTGAGGCTTTTAAAAAGAATCCTGAT |
| | | | TTTGAAAAATTGTTTAAGGAAGGATTGTTCAAAGAACTTTTACCCG |
| | | | AATTAATCAAATCTGCTCCCGTTGACGAAATAGCAGTCAAAACAA |
| | | | AAGCTTTGGAGTGTTTTAATAGATTTAGTACATATTTTACAGGCTT |
| | | | TCATGACAACAGAAAAAATATGTATAGTGAAGAGGCAAAGTCTAC |
| | | | GGCAATAAGTTATCGTATCGTAAATGAAAATTTCCCAAAATTTTTT |
| | | | GCAAATATAAAACTGTTCAATTATTTAAAAGAGCATTTTCCAAGAA |
| | | | TAATTATTGATACAGAGGAATCTTTAAAAGATTACCTCAAAGGTA |
| | | | AAAAACTTGACTCTGTGTTCAGTATTGATGGTTTTAACAGTGTACT |
| | | | GGCTCAAAGTGGAATTGATTTTTATAACACAGTAATTGGTGGAATT |
| | | | TCTGGTGAAGCAGGAACAAAAAAAACTCAGGGATTGAATGAAAA |
| | | | AATCAATCTTGCAAGACAACAATTGTCGAAAGAAGAAAAAAATAA |
| | | | ACTTCGTGGTAAAATGGTTGTCTTGTTTAAACAGATTTTAAGTGAT |
| | | | AGAGAAACCTCTTCTTTTATTCCAGTTGGTTTTGCAAATAAAGAGG |
| | | | AGGTTTATTCAACTGTTAAGGAATTTAATAACTCAATTGCTGAAAA |
| | | | GGCTGTTTCAAAAGTAAGAGACTTATTCTTACACAGAGAAGAATTT |
| | | | ACTCTTAATGAAATCTTCGTTCCTGCAAAGTCATTGACAGATTTTT |
| | | | CTCAAGCGATTTTTGGGTCTTGGTCAATACTTTCTGAAGGTCTGTTC |
| | | | TTGCTGGAAAAAGATAGCATGAAAAAGGCTTTATCTGAGAGTCAA |
| | | | GAAGAAAAAATCAATAAGGAAATTGCGAAAAAAGATTGTTCTTTT |
| | | | ACAGAATTGCAGTTGGCTTATGAAAGATATTGTACTGAACATAATC |
| | | | TACCTGTAGAGAAATTTTGCAAGGATTATTTTGACATTGTAGATTA |
| | | | TCGTGGAAATGGTGCAAAATCAGAAAAGACAAAAGTTTCTATTCT |
| | | | TTCTGAAATTTTGGAGACATTTTTGCAACTTGATTTTGACCATATTC |
| | | | AGGATTTACAACAAGAAAAAAATGCGGCAATTCCTATAAAAGCCT |
| | | | ATTTAGATGAAGTACAGAATCTATATCACCATTTGAAATTGGTAGA |
| | | | TTATCGTGGTGAGGAACAAAAGGATTCAACTTTTTATTCTAAACAT |
| | | | GATGAGATTTTGACTGATCTTTCGCAAATCGTTCCCCTTTATAATA |
| | | | AAGTTAGAAACTTTGTTACCAAGAAACTTGGAGAAAGTAAAAAGA |
| | | | TAAAACTTAATTTTGATTGTCCAACTTTAGCAAATGGCTGGGATGA |
| | | | AAACCAAGAGTCTTCTAATGATGCCATTATCTTGAGAAAAGATGG |
| | | | GAAATATTATCTTGGAATTTATAATCCAAATAACAAGCCAAAATTT |
| | | | GCTAAGAAAGATAGCATTGTTGGTGATTGTTATGAAAAAATGGCT |
| | | | TATAAACAAATAGCACTTCCAATGGGATTAGGTGCATTCGTAAGG |
| | | | AAATGTTTTGGTACCGCTCAAAAGTATGGCTGGGGTTGTCCAGAA |
| | | | AATTGCTTAAATTCTGAAGGAAAAATTATAATCAAAGATGAGGAA |
| | | | GCAAAAGGAAATTTAGAGGCAATTATCGATTGTTATAAAGACTTC |
| | | | TTAAATAAATATGAAAAAGATGGTTTTAAATACAAAGATTACAAT |
| | | | TTCAGCTTTTTAGATTCTGCTTCTTATGAAAAATTATCTGACTTTTT |
| | | | TAACGATGTAAAACCTCAAGGTTATAAACTCTCCTTCACAAGTATT |
| | | | CCATTATCAGAAATTGATAAAATGATAGATGAAGGCAAGCTCTTC |
| | | | CTTTTCCAGATTTACAACAAGGACTTTGCGAAGAAAGCGACAGGG |
| | | | AAGAAAAATCTTCATACCTTGTACTGGGAGAATCTTTTTAGTGTTG |
| | | | AGAACTTGCAGGATGTGGTCTTGAAATTGAATGGCGAGGCGGAAC |
| | | | TCTTTTGGAGGGAGGCAAGCATCAAAAAGGATAAGGTCATTGTCC |
| | | | ACAAGAAAGGTTCTATTCTGGTGAATAGGACGACTACAGACGGAA |
| | | | AATCTATTCCAGAGGCCATCTATCAGGAAATTTATCAACTTAAGAA |
| | | | CAAGATGGCTGACTCCATTTCTGATGAAGCCAAAAGGTTGTTGGA |
| | | | GTCAGGAACTGTCGTTTGTAAGGTTGCCACCCATGATATCGTGAAG |
| | | | GACAAGCACTTCACAGAGAATACCTATCTGTTCCACTGTCCTATTA |
| | | | CCATGAATTTCAAGGCGAAGGATAGAACAAATAAGGAATTTAATA |
| | | | ATCATGTCTTGGAGGTTCTCAATAAGAATCCAGACATAAAAGTCAT |
| | | | TGGCTTGGATCGTGGAGAGCGTCATTTGCTCTATCTTTCTTTGATCA |
| | | | ACCAAAAAGGTGAGATTGAATGCCAGAAAACACTGAATTTGGTGG |
| | | | AGCAAGTGAGGAATGACAAGACTGTCTCTGTAAACTACCATGAAA |
| | | | AGCTGGTCCACAAAGAGGGTAGTCGTGATGCAGCACGAAAGAATT |
| | | | GGCAAACGATTGGGAATATAAAGGAATTGAAGGAGGGGTATCTTT |
| | | | CCGCTGTAGTCCATGAGATTGCCAGCTTGATGGTGAAGCATAATGC |
| | | | AATCGTTGTTATGGAGGATTTAAACTTCGGGTTCAAGCGGGGACGT |
| | | | TTTGCAGTTGAGCGTCAGATTTATCAGAAGTTTGAGAATATGCTGA |
| | | | TAGAAAAGCTGAATTATCTTGTTTTCAAAGATAGGAAGGTCACTG |
| | | | AGCCGGGCGGAGTATTGAATGCCTATCAATTGGCGAATAAGTCTG |
| | | | CAAAGGTGACGGACGTTTACAAGCAATGTGGATGGCTTTTCTACAT |
| | | | CCCCGCAGCCTACACCTCCAAGATTGACCCTCGGACTGGATTTGCC |
| | | | AATCTTTTTATCACAAAGGGGCTGACAAATGTGGAAAAGAAGAAG |
| | | | GAATTCTTTGGAAAGTTTGATTCAATCAGATATGATGCCACGGAGT |
| | | | CATGCTTTGTCTTTAGCTTTGATTACGCAAAAATCTGTGACAATGC |
| | | | AGACTACAAGAAAAAATGGGATGTGTACACGAGGGGAACCCGGC |
| | | | TTGTGTACAATAAAACTGAACGGAAGAATGTTTCTGTCAATCCCAC |
| | | | AGAAGAGTTGCAGTGTGTATTTGATGAATTTGGAATCAAGTGGAA |
| | | | TACTGGAGAGGACTTGATTGAATCCATCAGTTTGATTCCGGCAGAA |
| | | | AAGTCGAATGCAAAATTCTTTGACGTTCTGTTGAGGATGTTCAATG |
| | | | CCACACTGCAAATGAGGAATTCTGTGCCGAATACGGACACTGACT |
| | | | ACTTGGTTTCTCCTGTGAAAGCGGAGGACGGTTCTTTCTTTGATTCT |
| | | | CGTGAGGAGTTTAAGAAAGGTGGAGATGCAAGGCTTCCCATTGAC |
| | | | TGTGATGCCAATGGAGCGTATCACATTGCGTTGAAGGGTCTGTATT |
| | | | TGCTGTTGAATGACTTCAATCGGGATAACAAGGGAGTGATTCAGA |
| | | | ATATCTCCAACAAGGATTGGTTCAAGTTTGTACAGGAGAAAGTAT |
| | | | ACAAGGACTGA |
| 74 | ID414 | 5 | ATGAAAGAACAGTTTATAAATTGCTATCCATTATCCAAAACTTTAA |
| | | | GATTTTCTTTAATCCCTGTTGGAAAAACCGAAGATAATTTCAATAA |
| | | | AAAGCTTTTGCTTGAAAGCGATAAACAAAGAGCGGAGAATTATGA |
| | | | AAATGTCAAAAGCTATATTGACCGCTTTCATAAAGAATATATTAAA |
| | | | TCTGCATTAGCAAACGCAAGAATTGAAAAAATCAATGAATATGCG |
| | | | GCTTTATATTGGAAAAACAATAAGGATGATTCTGACGCAAAAGCT |
| | | | ATGGAATCGTTAGAAGATGATATAAGAAAGCAAATATCCAAACAA |
| | | | CTTACATCAACCGCAAACTTTAAAAGACTGTTTGGAAAAGAGTTG |
| | | | ATATGTGAAGACTTACCGGCTTTTTTAACAGATGAAAATGAAAAA |
| | | | GAAACAGTTGAATGCTTTAGAAGCTTTACAACATATTTTAATGGTT |
| | | | TTAATACTAATCGAAAGAATATGTATTCGAGTGAAAAAAAGTCAA |
| | | | CTGCAATAGCTTATCGTTGTGTAAATGACAACCTTCCTCGCTTTTTA |
| | | | GATAATATAAAAACCTTTCAAAAAATATTCGATAATCTTTCTGATG |
| | | | AAACTATCACAAAACTAAACACAGATTTATATAATATATTCGGCA |
| | | | GAAAAATTGAAGATATTTTTTCTGTTGATTATTTTGATTTTGTTTTG |
| | | | ACTCAATCAGGCATTGATATTTATAATTATATGATCGGCGGATATA |
| | | | CTTGCTCAGACGGAACCAAAATCCAAGGTCTTAATGAATGTATAA |
| | | | ATCTTTATAACCAGCAGGTTGCCAAAAATGAAAAATCAAAAAGAT |
| | | | TGCCGTTAATGAAACCGTTACGTAAGCAAATCTTAAGTGAAAAGG |
| | | | ACAGTGTATCGTTCATTCCCGAGAAATTCAATTCAGACAACGAAGT |
| | | | GTTGCTTGCGATTGAAGAATATTATAATAACCACATTAGTGATATC |
| | | | GATTCGCTTACAGAGCTTTTGCAATCATTAAACACTTATAATGCCA |
| | | | ATGGAATATTTATAAAATCAGGTGCTGCCGTTTCCGATATTTCAAA |
| | | | CGCTGCATTTAACTCATGGAATGTATTACGCTTAGCTTGGAATGAA |
| | | | AAGTATGAAGCTTTGCATCCCGTAACAAGCACAACAAAAATCGAT |
| | | | AAATATATTGAAAAGCGAGACAAGGTATATAAATCAATAAAAAGC |
| | | | TTTTCGCTTTTTGAACTTCAAGAGCTTGGTGCGGAAAATGGGAATG |
| | | | AAATAACCGATTGGTATATTTCATCAATCAATGAATGTAACCGCAA |
| | | | AATAAAAGAAACTTATTTGCAGGCACGGGAATTGCTGGAATCCGA |
| | | | TTATGAAAAGGACTACGATAAAAGACTTTATAAAAATGAAAAAGC |
| | | | AACAGAGTTAGTAAAAAACCTGCTTGACGCAATAAAGGAATTTCA |
| | | | ACAGCTTGTTAAACTGTTAAACGGCACAGGTAAAGAAGAAAACAA |
| | | | GGACGAGCTTTTTTACGGCAAATTCACTTCACTTTATGACTCGGTA |
| | | | GCAGATATTGACAGGCTTTACGATAAGGTTAGAAACTACATTACTC |
| | | | AAAGACCTTATTCCAAAGATAAAATAAAGCTGAATTTTGACAATC |
| | | | CCCAACTTCTTGGCGGATGGGATAAAAACAAAGAAAGCGATTACA |
| | | | GAACCGTTATTCTTCGCAAAAATGATTTTTACTATCTTGCCGTTATG |
| | | | GACAAATCACACAGTAAGGTTTTTGTTAATGCACCTGAGATAACCT |
| | | | CTGAAGACGAGGATTATTACGAAAAAATGGAATATAAGCTTTTGC |
| | | | CCGGTCCCAATAAAATGTTGCCAAAGGTTTTCTTCGCCTCTAGAAA |
| | | | TATTGACAAATTTCAACCGTCAGACAGAATACTTGATATTCGCAAA |
| | | | AGAGAAAGCTTTAAAAAAGGAGCGACATTTAACAAATCCGAATGT |
| | | | CATGAGTTTATAGATTATTTTAAGGAATCTATTAAGAAGCATGATG |
| | | | ATTGGTCAAAATTCGGATTTGAGTTTTCTCCTACAGAAAGCTATAA |
| | | | CGATATTAGCGAATTTTATCGAGAAGTTTCAGATCAAGGCTATTAT |
| | | | ATTAGCTTTAGTAAAATATCAAAAAACTATATCGATAAGCTTGTAG |
| | | | AAAACGGATATCTTTATCTTTTTAAAATCTATAATAAAGACTTTTC |
| | | | AAAGTACAGCAAAGGAACTCCGAATTTACATACTTTGTATTTCAAA |
| | | | ATGCTTTTTGACGAGAGAAATTTATCAAATGTGGTATACAAGCTCA |
| | | | ACGGTGAAGCCGAGATGTTCTACCGTGAAGCAAGTATAAATGACA |
| | | | AAGAGAAAATAACTCATCATGCCAATCAACCGATAAAAAACAAAA |
| | | | ATCCTGATAACGAGAAAAAAGAAAGCGTTTTTGAGTATGATATTG |
| | | | TAAAAGACAAAAGATTTACCAAAAGGCAATTTTCACTTCACGTGT |
| | | | CTGTTACAATCAACTTCAAGGCACACGGTCAGGAATTTTTGAACTA |
| | | | TGATGTTCGCAAGGCGGTTAAATATAAAGATGATAATTACGTTATC |
| | | | GGCATTGACCGTGGCGAAAGGAATCTGATTTATATCAGCGTTATCA |
| | | | ATTCAAACGGTGAAATTGTTGAACAAATGTCGCTTAATGAAATAA |
| | | | TCGGTGACAACGGATACAGTGTTGATTATCAAAAGCTTTTGGATAA |
| | | | GAAAGAAAAGGAAAGAGATAAAGCAAGAAAAAACTGGACCTCTG |
| | | | TTGAAAATATAAAGGAACTGAAAGAAGGCTACATCAGCCAGGTTG |
| | | | TTCACAAAATCTGTGAATTAGTCGTTAAATATGATGCCGTTATCGC |
| | | | TATGGAGGATTTAAACTTCGGCTTCAAGCGCGGTAGGTTTCCTGTT |
| | | | GAAAAGCAAGTTTATCAAAAATTTGAAAATATGCTTATTTCCAAAC |
| | | | TCAATTTGCTTATTGATAAGAAGGCGGAACCGACCGAAACCGGCG |
| | | | GTCTTTTGCGAGCATATCAGCTTACGAATAAATTCGACGGCGTAAA |
| | | | TAAGGCTAAGCAAAACGGTATCATCTTTTATGTTCCGGCTTGGGAT |
| | | | ACAAGTAAAATAGATCCGGTAACGGGCTTTGTTAATCTTTTAAAGC |
| | | | CAAAATACACAAGTGTGCGGGAAGCTAAAAAGTTATTTGAAACAA |
| | | | TTGATGATATCAAATATAACACAAACACCGATATGTTTGAGTTCTG |
| | | | TATTGATTATGGTAAATTCCCGAGATGCAATTCGGATTTCAAAAAA |
| | | | ACTTGGACTGTTTGCACTAATTCAAGCAGAATTTTATCCTTCCGGA |
| | | | ATGAAAAAAAGAATAACGAGTGGGACAATAAGCAAATTGTTCTTA |
| | | | CCGATGAATTCAAATCGTTGTTTAATGAATTTGGCATTGATTATAC |
| | | | AAGTGATCTTAAGGCTTCTATTTTAAGCATTTCCAATGCCGATTTTT |
| | | | ACAATCGATTGATAAGACTTCTTTCATTAACACTTCAAATGAGAAA |
| | | | CAGTATTATCGGCAGCACATTACCGGAAGATGACTACCTTATTTCG |
| | | | CCTGTTGCAAATGACAGAGGTGAGTTCTATGACAGTCGTAATTATA |
| | | | AAGGCTCAAATGCCGCTTTGCCTTGCGATGCCGATGCGAATGGCG |
| | | | CATATAATATTGCAAGAAAAGCGCTTTGGGCAATAAATGTTTTAA |
| | | | AAGACACTCCGGATGATATGCTTCAAAAAGCAAAACTTAGTATAA |
| | | | CTAATGCCGAATGGCTTGAATATACACAAAGATGA |
| 565 | ID418 | N/A | ATGAAGGCCGAGCTGTTCAAAACCTTCGTGGATGAATACCCTGTGT |
| | | | CCAAGACACTGCGGTTCTCTCTGATCCCCGTGGGGAGAACCCTGG |
| | | | AGAATATTGAGAAGGACGGCATCCTGGATTGCGACGAGAAGCGGT |
| | | | CAGAAGAGTACAAGAGAGTGAAGAAGCTGCTGGATGAGTATTATA |
| | | | AGACCTTCATCGAGCACGCCCTGACCAATGTGGAGCTGGACATCA |
| | | | ACAGCCTGGAGGAGTACGAGCGCCTGTACAACATCAAGAATAAAT |
| | | | CCGACAAGGAGAAGGCTGACTTCGATTCAGTGCAGAAGAATCTGA |
| | | | GAAAGCAGATTGTGAAGGCACTCAAGGAGGACGAAAAGTATAAG |
| | | | TTCCTGTTTAAGAAGGAAATCATCGAGAAAGAGCTGGTTGACTTTC |
| | | | TGAACGGCCGCGACAGCGACGTGGAACTGGTGAAAAGCTTCAAGG |
| | | | GCTACGCTACAATGTTTCAGGGCTTTTGGGACGCACGCAAGAATAT |
| | | | CTTCTCAGACGAGGAGAAAAGCACAGCCATCGCCTATAGAATTAT |
| | | | CAACGAGAATCTGCCTAAGTTCATTTCCAACAAAAATATCTACTTT |
| | | | ACAAAGATCCAGCCAGAGATGGACGCCGAACTGGATCAGCTGACT |
| | | | CTGTCAAATAATTCCAACGAAATCAGGGATATCTTTAAGCTGGAAT |
| | | | ACTTCAGCAAAACCATCACACAGACAGGCATCGAGATCTACAATG |
| | | | GCATCCTGGGCGGATATACCATCGACGAGCAGGTGAAACTGCAGG |
| | | | GCATTAACGAGATTGTGAACCTGCACAACCAGAAGAATAAGGACA |
| | | | GCGGGAAGATTCCAAAGCTGAAAATGCTGTACAAACAGATCCTGT |
| | | | CTGACACTAACACTCTGAGCTTCATCGCTGAAGGGTTCGAGACCG |
| | | | ACGACGAAGTGCTGGAGAGCCTGAATATCTTTTACGACGTGTTCA |
| | | | ACGAGAATATCCTGGATGAGGACCTGGGCATCATCAATCTGCTGA |
| | | | GAAATATCGATAAATTCTCCTATGACGGAATCTACATCAAGAATG |
| | | | ACAAGGCCCTGATCGATATCTCCAATTACCTGTTCGGGGACTGGCA |
| | | | TTACATTAAAAACGCTATCAATAAGAAGTATGAAATCGATAACCC |
| | | | TGGCAAAAACACCGAGAAGTATATTGTGAAGCGGAACAAGTTCAT |
| | | | TAAATCTTTCGACAGTTTCTCCCTGAAGTATCTGCAGGACTGCACC |
| | | | GGCTCTAAGTTCAATGAGCACATCCTGATTAAGATCAACAATTTAA |
| | | | TCGACGACGTGAAGAAGGCCTACAATAGCGTGGCACTGCTCATCA |
| | | | AGAATAAGTACGAGGGGACCAATCTCATTAACGACAAGGACGCCA |
| | | | TCGAGAAGATCAAGCAGTTCCTGGATTCTATGAAGAGCCTGGTGT |
| | | | CTTTCATCAGGTGCTTCGAAGGTACCGGCCAAGAGCCCGACCGGG |
| | | | ACGAGATCTTTTACGGGGAATTCGACACCGGGAAGAAGACCTTCT |
| | | | ACTATCTGAACAACATCTATAATAAGACCAGAAATTACGTGACCA |
| | | | AGAAACCATATAGCATCGAGAAGTACAAGCTGAATTTCGATAACG |
| | | | CAGAGCTGCTGACTGGGTGGGACCTGAATAAGGAGACCTCTAAGG |
| | | | CCAGTATCATCCTGAAGAAAGACAACCTGTACTACCTGGGCATCA |
| | | | TGAAGAAGAGCGACCGGCGAGTTTTCCTGAACGTGCCTGAGACCG |
| | | | AATCCACCTACAACTGCTACGAAAAAATGGAGTACAAGCTGCTGC |
| | | | CCGGGCCGAACAAAATGCTGCCAAAGGTTTTCTTCGCCAAATCCA |
| | | | ACATCGACTACTATGATCCATCCCCCGAAATTATGCGCATCTACAA |
| | | | GGAGGGCACTTTTAAGAAGGGCGACAATTTTAACATCGATGATTG |
| | | | TCACGACCTGATTGACTACTTCAAAGAGTCACTGGACAAAAATGA |
| | | | TGACTGGAAGATTTTCGATTTCGACTTCTCCGAGACCTCATCTTAT |
| | | | AAGGATATTGGAGAGTTTTACAAGGAGGTGCAGCAGCAGGGATAC |
| | | | AAAATTAGCTTTAAGAATATCGCCTCATCATACGTGGATGAACTGG |
| | | | TGGAGAACGGCAAGCTGTACCTGTTCCAGATCTACAACAAAGATT |
| | | | TTAGCAAGAACAGCAAGGGAACAGAGAACCTGCATACAATGTATT |
| | | | GGCGCGCCCTGTTCGATGAGGAGAACCTGGAGAACGTCATTTACA |
| | | | AGCTGAACGGAGATGCTGAGATCTTTTTTAGGCGGAAGAGCATCA |
| | | | GCGAGAATGAGAAGATCGTGCACCCAGCCCACGTGGAGATCGAGA |
| | | | ACAAAAATGATGAAACTAGGAAGGAAAAGAAGACCTCTATTTTCA |
| | | | ACTACGACATCATTAAAGACAAGCGCTTCACAGTGGACAAATTTC |
| | | | AGTTCCACGTGCCTATCACTCTGAATTTCCAGGCCATCGACAGGAA |
| | | | GTCCGATATCAACCTGCGCATGAGACAGGAGATCAAAAAAAATAA |
| | | | GGACATGCATATCATCGGTATTGACCGCGGGGAGCGGAATCTGCT |
| | | | GTACATTAGCATCATCGATCTGGACGGAAACATCGTGAAGCAGGA |
| | | | AAGCCTGAATACAATCACTAATGAGTACGACGGCAAAATCTACAC |
| | | | CACCGACTATCACAAGCTGCTGGATAAAAAGGAGGAGAAGCGGA |
| | | | AAGTGGCCAGGCAGACATGGAACACAATCGAGAACATCAAAGAG |
| | | | CTGAAGGCCGGCTACATGAGCCAGGTGGTGCACAAGATCACCCAG |
| | | | CTGATGATGGAATACAACGCCATCGTGGTGCTGGAGGACCTGAAT |
| | | | ACTGGCTTTAAAAGGGGTCGTCAGAAGGTGGAAAAACAGATCTAC |
| | | | CAAGCCTTCGAGAAAGCTCTGATCAACAAGCTGAATTATTACGTG |
| | | | GACAAGAAGGTGGATAAGAACGAGATCAGCGGGCTGTACAAGCO |
| | | | CCTGCAGCTGACCAAGGAATTTGAGAGCTTTAAGAAGCTGGGAAA |
| | | | GCAGTCTGGCGCAATCTTTTATGTGCCTGCATGGAACACCAGCAAG |
| | | | ATGGACCCCACAACCGGATTCGTGAACCTGCTGTCTGTGAAGTAC |
| | | | GAGAACATGGAGAAGTCCAAGGAATTCATCAACAAAATCAAGGA |
| | | | CATTAATTTCAAAGAAGATGACTGTGGCAAATATTACGAGTTTCAT |
| | | | ATCGATTTCAACGAATTCACCGATAAGGGCAAGGATACCAAGACT |
| | | | GACTGGAATATCTGTTCTTTCGGCAAGCGCATTGACAATGCCAGGA |
| | | | ATCAGAAGGGGGACTTCGAGAGCAAGATGATCGATCTGACAAATG |
| | | | AGTTCCACAACCTGTTCAAGAAGTATGGCATCAATGACAACTCCA |
| | | | ACCTCAAGGAGGACATTCTGAACGTCAAAGAGGCCAAATTCTACA |
| | | | AGGAGTTCATCAATCTGTTCAAGCTGATGCTGCAGATCAGGAACA |
| | | | GCGAGAGTAACGAGAAGGTGGACTTCCTGCAGTCCCCCGTGAAGA |
| | | | ATAACAAGGGCGAATTCTTCAACTCCAACAACGTGAACGGAAATG |
| | | | AGGCCCCTGAGAACGCCGACGCCAATGGGGCCTACAACATTGCCC |
| | | | GGAAAGGCCTGTGGATTGTTAACCAGATCAAGACTATGCCGGACT |
| | | | CACAGATGCACAAGATCAAGCTGGCTATGAAGAATCAGGAATGGC |
| | | | TGCTGTTCGCCCAGAAAGGGAACGTGTGA |
| 366 | ID406 | 10 | ATGGCAACGATTGAGAATTTTTGTGGACAAGAGAATGGGTATTCT |
| | | | CGGTCAATTACTTTAAGAAATAAGTTGATTCCTATTGGAAAAACAG |
| | | | CGAACAACTTAAAACAATTTTTGGAAAAGGATCAAGAAAGAGCTG |
| | | | ATGTTTATCCTGAAATTAAAAAGTTAATTGATGAAATACATAGAG |
| | | | GCTTTATTGAAGATACTCTTTCTAAGTTTTCATTTGTATGGGAACCT |
| | | | TTATTTGATGATTTTGAATTATATCAAAATGAAAAGGATAAATCTA |
| | | | AAAAAGCCACAAAGAAAAAAGATTTAGAGAAATTTCAAAGTGGA |
| | | | GCAAGAAAAAAAATTGTGGAAGCGTTTAAGAAGCATCCAGACTAT |
| | | | GACAAACTTTTTAAAGATGGATTATTTAAGGAATTATTACCAGCTT |
| | | | TGATAAAAAATTCTTCTGATTCTGAAATATCAAATAAAGAAGAAG |
| | | | CATTAAAAGTTTTTGATAGATTTAGTACATATTTTGTTGGTTTTCAC |
| | | | GAAAATAGAAAAAATATGTATAGCGAAGAAGACAAATCTACTGCA |
| | | | ATAAGCTATAGAATAGTTAATGAAAACTTTCCAAAATTCTATGCCA |
| | | | ATGTAAAATTGTACAATTATATAAAAGAAAATTTCCCAAAAATTAT |
| | | | TTCTGAGACAGAGGAATCTTTAAAGAATCATTTGAACGGAAAAAG |
| | | | ACTTGATGAGATTTTTAATGCAGAATCTTTTAATGATGTATTAGCA |
| | | | CAAAGTGGAATTGACTTCTATAACACTGTTATTGGTGGTATTTCTA |
| | | | CAGAAACAGAAAAAGTTCAAGGTTTGAATGAAAAAATAAATCTTG |
| | | | CAAGACAAAAACTTCCCGCAGAAGAAAAAAATAAACTACGGGGT |
| | | | AAAATGGTAGTTTTGTTTAAGCAGATTTTAAGTGATAGAGGAACAT |
| | | | CATCTTTTATTCCTGTTGGTTTTAACAACAAGGAAGAAGTCTATTC |
| | | | TTCTGTAAAATCATTCAATGATGAATTTGTAAATATTTCTGTTTGTG |
| | | | AAACAAAAGAATTATTCAAACAAGTTGCAGAGTTTAATCTTAGTG |
| | | | AAATTTATGTTCCAGCAAAATCTTTAACAAACTTTTCGCAAAATAT |
| | | | TTTTGGTTCTTGGTCAATTCTAACAGAAGGACTTTTCTTATTAGAA |
| | | | AAAGATAAAGTGAAAAAAGCATTATCAGAAAATAAAGAAGAAAA |
| | | | AATCAACAAAGAGATTGCAAAAAAAGATTATTCTTTGGATGAGTT |
| | | | ACAAGTTGCTTATGAAAGATATTGTAATGAACATAATTTTTCAGTA |
| | | | GAGAAAAATTGCAAAGATTATTTTGATGTTGTTGATTATCGATCAG |
| | | | AAAATGAAAAATCTGATAAGAAAAAAATTTCTATACTTTCAGCTA |
| | | | TTACAGAATCTTATTCAAAAATAGATTTTGAAAATATTCATGATTT |
| | | | ACAACAAGAAAAAGAAGCCGCTACACCAATTAAAACATATTTGGA |
| | | | TGAAGTTCAGAATTTATATCATCATCTAAAACTTGTTGATTATCGT |
| | | | GGGGAAGAACAAAAAGATTCAAACTTTTATTCAAAATTGGATGAA |
| | | | ATCATTACTCAGCTTTCAGAAATTATTCCTTTATACAATAAAGTTA |
| | | | GAAACTTTGTTACAAAGAAACCTGGTGAAATGAAGAAGATAAAAT |
| | | | TGAATTTTGATTGTCCTACTCTAGCTAATGGATGGGATGAAAATAA |
| | | | AGAATCTTCAAATGATGCAATAATTTTAAGAAAGGATGGTAAATA |
| | | | TTATTTAGGAATTTTTAATCCAAATAATAAACCAAAATTTTCTAAA |
| | | | ATCGAAAACATTTCTGAATCATACTACGAAAAAATGGTGTATAAA |
| | | | CTTTTACCAGGCCCAAACAAGATGTTACCAAAAGTCTTTTTTTCAA |
| | | | CAAAAGGACAAGAAACATTTTTGCCACCAAAAGATTTGCTCTTAG |
| | | | GATATGATGCAGGTAAACATAAAAAAGGTGATGCTTTTGATAAAG |
| | | | AATTTATGTATAAATTAATTGATTGGTTTAAAGATGCAATTAATCG |
| | | | TCATGAAGATTGGAAAAAATTTAATTTTGTATTCTCTCCTACAAAA |
| | | | TCTTACGAAGATATGAGTGGTTTTTATAGGGAAGTTGAATTACAAG |
| | | | GGTATAAAGTTTCTTTTCAAAAAATATCTGACACAGAAATAAATTC |
| | | | TTTTGTAAGCAACGGAAAACTTTTCCTTTTCCAAATATACAATAAA |
| | | | GACTTTGCTTTAAAAGCTTCTGGAAAGAAAAATCTTCATACACTTT |
| | | | ATTGGGAAAATCTTTTTAGTGAAGAAAACTTAAAAGATGTTTGTCT |
| | | | AAAATTAAATGGAGAAGCAGAATTATTCTGGAGAAAACCAAGTTT |
| | | | GAACAAAGAAAAAGTTACTGTTCACGAAAAAGGTTCAATTCTTGT |
| | | | AAATAGGACAACAAATGACGGAAAGTCAATTCCAGAAGACATTTA |
| | | | TCAAGAAATTTATCAATTCAAAAATAAAATGAAAGATAAAATTTC |
| | | | TGACAATATTTCTATACAGAATGATGATGGTAAAGTCATTACGATT |
| | | | ACAGTAACTTTGGAAAATAAGCAAAAAGAAAAATTCACAGAAAAT |
| | | | TATAAAGTTGTATATAAAACTGCAACTCACTATATTACAAAGGATA |
| | | | ATCGTTTTACAGAAGACACTTATCTTTTCCATTGTCCTATTACAATG |
| | | | AACTTTAAGGCACCTGATAAATCAAATAAAGAATTTAATAATCAT |
| | | | GTTCTTGAAGTATTGAGTGGTAATCCTAATGTAAAAATTATTGGAT |
| | | | TGGATCGAGGCGAAAGACACCTTATTTATCTTTCATTGATAAATCA |
| | | | AAAAGGTGAAATTGAACTTCAAAAAACATTAAATCTTGTTGAACA |
| | | | AGTTAGAAATGATAAAACTGTAAAAGTAAATTATCAAGAAAAACT |
| | | | TGTACACAAAGAAGATGATAGAGATAAGGCTCGTAAAAGCTGGCA |
| | | | AACAATTGGAAATATCAAAGAATTAAAAGAAGGCTATCTTTCAAA |
| | | | TGTTGTTCATGAAATTGCAAAAATGATGGTTGAACATAACGCAATT |
| | | | GTTGTTATGGAAGATTTGAATTTTGGATTTAAGCGGGGGCGTTTTG |
| | | | CTGTAGAAAGACAGATTTATCAAAAATTTGAAAATATGTTAATTG |
| | | | AAAAACTAAATTATCTTGTTTTCAAAGATAAAAAGGTAACAGAGC |
| | | | CTGGTGGTGTTCTTAATGCTTATCAATTAACAAATAAATCTGCAAA |
| | | | TGTATCTGATGTCTACAGACAATGTGGATGGCTTTTCTATATTCCT |
| | | | GCTGCTTATACTTCAAAGATTGATCCAAAAACTGGTTTTGCAAATC |
| | | | TTTTTATTACAAAAGGCTTAACAAACGTAGAAAAGAAAAAAGAAT |
| | | | TTTTTGATAAGTTAGATTCTATTCGTTATGACTCAAAAGAAGATTG |
| | | | TTTTGTTTTTGGATTTGATTATGGAAAAATCTGTGATAATGCTGATT |
| | | | TTAAGAAAAAGTGGGAAGTTTATACAAAAGGGGAACGACTTGTTT |
| | | | ACAATAAAACTGAACGCAAGAATATTAACATAAATCCAACAGAAG |
| | | | AATTGAAGTCAATCTTTGATGACTTTGGAATAAATTGGAATAATGA |
| | | | AGAAAATTTTATTGATTCTGTCCATACAATCCAAGCTGAAAAATCA |
| | | | AATGCAAAATTCTTTGATACACTTTTAAGAATGTTTAATGCAACTT |
| | | | TGCAAATGAGAAATTCTATTCCAAACACGGAAATTGACTACTTAAT |
| | | | TTCTCCTGTAAAATCAGAAGATGGAACTTTCTTTGATTCTAGAGAA |
| | | | GAATTGAAAAAAGGTGAAAACGCAAAATTACCAATTGATGCAGAT |
| | | | GCAAACGGAGCTTATCACATTGCATTAAAAGGTTTGTATTTGTTGG |
| | | | AAAATGACTTTAACCGTAATGATAAAGGTGTAATTCAAAACATCT |
| | | | CCAACGCCGATTGGTTTAAGTTTGTTCAGGAGAAAGAATATAGGG |
| | | | ATTAA |
| 362 | ID411 | 10 | TTGTTGTTTATAATTGAGTTTGAGGAGAAAATTATGAAAACAATTG |
| | | | AAAATTTTTGTGGCCAAAAAAATGGTTATTCTCGCTCTATTACCTT |
| | | | GCGAAACAGGTTGATTCCAATCGGAAAAACAGAAGAAAATATTGA |
| | | | AAAACTACAACTTCTTGATAATGACATTAAGCGTTCAAAGGCTTAT |
| | | | GTTGAAGTCAAGTCGATGATAGATGATTTTCACCGCGCATTCATAG |
| | | | AAGAAGTTCTTTCTAAGGCAAAACTTGAATGGGGGCCATTATATG |
| | | | ACCTGTTTGATTTGTTCCAGAATGAAAAAGACAAGCATAAGAAAA |
| | | | GTAAAATAAAAAAAGAGTTAGAAACCATTCAAGGTGTGATGCGAA |
| | | | AACAGATTGTAAAAAAGTTTAAGGATGATGATAGGTTTGACAAGC |
| | | | TTTTCAAGAAAGAAATTTTAACTGAATTTGTTCCAACTGTAATAAA |
| | | | GGCTGATGAATCAGGAACTATATCCGACAAGCGGGCAGCTCTTGA |
| | | | TGTGTTTAAGGGATTTGCGACATATTTTACAGGTTTTCACCAAAAC |
| | | | AGACAAAATATGTATAGCGAAGAGGCTAAGGCTACCGCTATCAGC |
| | | | AATAGAATAGTTAATGAAAATTTTCCAAAGTTCTATGCAAATGTAA |
| | | | AGGTTTTTGAATGCTTGCAGAAAGAGTATCCTGCAATTATCACTGA |
| | | | AACGGAAGAGGCTCTTTCTGAAATCCTTAATGGCAAAAAACTGGC |
| | | | TGATATTTTTAGCGCGGACGGATTTAATTCAGTTTTGAGCCAGAGC |
| | | | GGCATTGATTTTTATAATACGATAATTGGCGGCATTGCAGGAGAG |
| | | | GCAGGAACTCAAAAGTTGCAAGGCATAAACGAAAAAATAAATCTT |
| | | | GCCCGCCAGCAGCTTCCTACAGAAGAAAAAAACAAGCTCAAGCGG |
| | | | AAGATGAGTGTATTATACAAGCAGATTTTAAGCGACAGAAGTACG |
| | | | GCTTCTTTTATTCCGATTGGATTTGAATCAAGCGATGAAGTTTACG |
| | | | AATCTGTAAAACAGTTTAAGGAACAGTCATTAGATAATGTCATTTC |
| | | | CGCTGCAAAAGAATTGTTTGAAAAATCTGATTATGATTTGAGTCAG |
| | | | ATTTATGTTCCTGCAAAAGAAGTCACCGACTTTTCATTGAAGCTTT |
| | | | TTGGCAATTGGTCGATTTTGCATGACGGGCTTTTCTTAATTGAGAA |
| | | | AGATAATTCAAAGAAGACTTTCACGGAAAAGCAGATTGAAAACCT |
| | | | AAGAAAAGAAATCGCAAAAACAGATTGTTCTCTTGCGGATTTGCA |
| | | | GAACGCCTATGAGCGATGGGCAAAAGAAAATGATGTTAAAGCTGA |
| | | | AAAGACTGTAAAGAACTATTTCAAAATTGCAGAGCTTCGCGCTGA |
| | | | TGGAAAATCAAGAGAAAAAACTTCTGTGGAGATTCTGAATAAAAT |
| | | | TGAATCGACCTTTGAGAAAATTGATTTTGAAAAGCGAGATAATCTT |
| | | | ATAAAGGAAAAGGAGACGGCAACTCCGATAAAAGAATTCCTCGAC |
| | | | GAAGTTCAGAACCTTTATCATTATCTGAAATTGGTTGACTATCGTG |
| | | | GTGAAGAACAGAAGGACACCGATTTTTATTCAAAATATGATGAAA |
| | | | TACTGCAGACGCTTTCTGAAATTGTTCCGCTTTATAATAAGGTGAG |
| | | | AAATTTTGTCACAAAAAAGCCTAATGAGGTGAAGAAAGTAAAGCT |
| | | | GAATTTTGATAATGTTTCATTAGCAAAAGGTTGGGATGTAAACAA |
| | | | AGAATCTGATTATACATGTATTTTACTCCGCAGAAGTGGACTGTAT |
| | | | TATTTAGGAGTACTAAATCCAAAAGATAAGCCAAAGTTTGACTCT |
| | | | GAGAACAATGGTGAAACAAGTATAAATAAGAATGATTGTTACGAA |
| | | | AAGCTTGTTTATAAGTATTTTAAGGATGTAACAACCATGATTCCAA |
| | | | AATGTTCGACACAGTTAAATGATGTTAAACAGCATTTTAAAAACTC |
| | | | TAATGAAGATTATATTTTGGAAAACAATAATTTTATTAAGCCACTT |
| | | | GTAATTTCAAAGAGAATTTTTGATCTGAATAATAAAACTTTTGATG |
| | | | AAAAGAAAATGTTTCAAATTGACTATTATAGGAATACTGGCGATTT |
| | | | AAAAGGTTATACAGAAGCTGTAAAAGATTGGATTTCATTTTGTATG |
| | | | ACCTTTGTTCATTCCTATAAAAGTACCTGTATATATGATTTTTCTTC |
| | | | CTTAGGCGATTGCAGCCAATTTAAGCAGGTTGATCAGTTTTACAAA |
| | | | GAGATTAATCTTTTACTTTATAAAATTTGGTTTGTGAATGTAACTG |
| | | | CTGAAAAAATCAATTCCCTTGTAGATTCCGGTAAACTTTTCCTTTTC |
| | | | CAAATCTACAACAAAGACTATTCAACTGGTAAAGACGGCGGAAAC |
| | | | GGTTCAACAGGCAAAAAGAATCTTCATACGATGTATTGGGAAAAT |
| | | | TTGTTCAGCGAAGAAAATCTTCGGGATGTCTGCCTTAAATTGAATG |
| | | | GAGATGCAGAACTTTTCTGGCGGGATGCAAATCCTGATGTGAAAG |
| | | | ATGTATGCCATAAAAAAGGTTCAGTTCTTGTAAACAGAACGACCT |
| | | | CTGACGGTGAGACAATCCCAGAAGAAATATATCAAGAAATTTACA |
| | | | AGTTCAAAAATCCTAATAAACAGGAAAAAAGCTTTAAACTTTCTG |
| | | | ATACCGCAAAAGAACTTCTGGATAGTGGAAAAGTCGGTTTCAAAG |
| | | | AGGCCAAATTTGACATTATCAAAGACCGTCATTTTACACAGAAAA |
| | | | CATATCTGTTCCATTGTCCGATTACCATGAATTTTAAGGCTCCTGA |
| | | | AATTACAGGAAGAAAATTCAATGAAAAAGTCCAGCAGGTGTTGAA |
| | | | AAATAATCCTGATGTAAAGGTTATTGGTCTTGACCGTGGCGAGCGT |
| | | | CATTTGATTTATCTTTCGCTTATCAATCAAAAGGGCGAAATCGAGC |
| | | | TTCAGAAAACGCTCAACCTTGTGGAACAGGTTCGCAATGATAAAA |
| | | | CTGTTTCTGTAAATTATCAGGAGAAACTAGTCCAGAAGGAGGGAG |
| | | | AGCGTGGCAAGGCTCGCAAGAACTGGCAAACAATCAGCAATATCA |
| | | | AAGAATTAAAAGAAGGATATCTTTCAAACATTGTTCACGAGATTG |
| | | | CAAAATTAATGGTAGAAAATAATGCAATTGTCGTAATGGAAGATT |
| | | | TGAATTTTGGATTTAAACGAGGACGATTTGCGGTTGAGCGTCAAGT |
| | | | TTACCAGAAGTTTGAAAACATGCTCATTGAAAAGCTTAATTATCTT |
| | | | GTGTTCAAGGATAAGAAAGTCGCTGAGCCTGGTGGCGTTTTGAAT |
| | | | GCATATCAGCTAACTGACAAAGTTGCAAATGTAAGCGATGTTGGC |
| | | | AAACAGTGCGGATGGATTTTCTATATTCCGGCTGCGTATACTTCAA |
| | | | AAATTGATCCAAAGACTGGTTTTGCAAATCTTTTTTATACTGCAGG |
| | | | GCTTACAAATATCGAAAAGAAAAAAGATTTCTTTGATAAGTTTGAT |
| | | | TCTATTCGCTATGACAGAAAAACAGATTCGTTTGTGTTCACTTTTG |
| | | | ATTACAGCGACTTTGGAGATAATGCGGACTTTAAGAAAAAATGGG |
| | | | AACTCTATTCTAGGGGAGAGCGACTTGTTTTCAGCAAGGCAGAGA |
| | | | AATCTGTTGTTCATGTAAATCCAACAGAAAACTTAAAGGCATTGTT |
| | | | CGACAAGCAAGGGATAAACTGGAGTTCAGAAGATAATATTATAGA |
| | | | CCAGATACAGGCAGTGCAGGCTGAAAGAGAAAATTGCGCTTTTTA |
| | | | TGACGGCCTATACCGTTCGTTTACTGCAATTCTCCAGATGCGAAAT |
| | | | TCCGTTCCTAATTCTTCAAAAGGGGAAGATGATTATCTGATTTCAC |
| | | | CAGTCATGGCAGAAGATGGAAGTTTCTATGACAGCCGAGAGGAAG |
| | | | CTGAAAAAGGAAAAACGACTGACGGAAAATGGATTTCAAAGCTTC |
| | | | CTGTTGATGCTGATGCCAACGGCGCGTACCATATTGCGCTAAAGG |
| | | | GACTTTATCTTTTGCAGAATAATTTCAATTTAAATGAAAATGGCTA |
| | | | TATTGAAAACATTTCAAACGCCGACTGGTTTAAGTTTGTTCAGGAG |
| | | | AAGGAATATGCAAAATAA |
| 30 | ID415 | 2 | ATGGAGATGAGATTAATGGTTGTATTTGAGGATTTCACAAAACAG |
| | | | TATCAAGTGTCGAAAACATTAAGATTTGAATTGATTCCCCAAGGA |
| | | | AAGACCTTGGAAAATATGGAACGGGCAGGTATTGTAAAAGGAGAT |
| | | | TGTCAACGTAGTGAGGACTATCAAGAAGCAAAGAAAATTATCGAT |
| | | | AAAATTTATAAACACATTTTAAATTCATCCATGGCTAAGGTTGAAA |
| | | | TTGATTGGTCAACCTTAGCGGAAGCAACTAAAGAATTTAGGAAAA |
| | | | ATAAGGATAAAAAGAAATATGAAAATGTTCAAGTTCGTGTTAGAA |
| | | | AGAAACTGCTTGAAGATATAAAAAATCAAACAATCACAGTAGAAA |
| | | | AGGGGGCGAAAGATCTTTATAAGGCAATGTTTGAGAAAGAAATCG |
| | | | TTACGGGGGAAGTATGTGCTGCATTTCCCGAAATAGATTTAACGG |
| | | | ATGAAGAAAAAGCCATATTGGATAAATTTAAAAAATTTACAACGT |
| | | | ATTTTACAGGATTCTTTGAAAACAGAAAAAATATCTTTACTGATGA |
| | | | AGGTATCAGTACTTCTTTTACGTATCGACTGGTAAATGATAATTTT |
| | | | ATAAAATTTTATGATAATTGCAATCTTTATAAAGATATTATTGCCT |
| | | | CTGTTCCGGGATTGAAGGGCGAGTTTAAGAAATGTTTTAAAGACTT |
| | | | ACAGCTTTTTTCTAAATGTAGACTAGAAGAAATCTTTGAGACTTCT |
| | | | TTTTATAATCATATTTTGACACAAGACGGTATCGATGAATTTAATC |
| | | | AACTCTTGGGCGGAATTTCCGCAAAAGAGGGAGAAAAAAAGAAA |
| | | | CAAGGCTTAAATGAAGTTATCAATTTAGCTATGCAAAAAGACGAG |
| | | | GGAATTAGAAATAAGTTAAGATATAGAGCTCATAAATTTACGCCT |
| | | | CTTTTTAAACAAATTTTAAATGACCGGTCTACCTTGTCATTTATACC |
| | | | CGAAACTTTTGAAAATGACCGTAAAGTTTTGGAGTCTATAGAGGC |
| | | | ATATAAATTATATTTATCTGAACAGAATATATTAGAAAAAGCACA |
| | | | AGAATTACTGTGCAGCATGAATCGGTATGATTCTCGAAAGTTAAGT |
| | | | ATTGACGGTAAGTATATTTCAAAGCTGTCTCAGGCTATCTTTAACT |
| | | | CTTGGAGTAAGATTCATGATGGAATAAAAGATTATAAGAAGTCTT |
| | | | TACTTCCTAAAGAAACGAAAAAAGCTTTGAAAGGCATTGACATGG |
| | | | AATTAAAGCAGGGAGTAAGCGTGCAGGACATATTGGACGCACTTC |
| | | | CTGAAGAAAATTTTCATGAAGTTATAGTTGATTATACTCATAATCT |
| | | | TGTGCAAAAATGTCAAGCTGTATTGAGCGGGTCTTTGCCTGGTAAT |
| | | | ATTGAAACGGATAAAGATAAAACAGATATTAAGCTAGTAATGGAC |
| | | | CCACTGTTGGATTTGTATCGGTTTTTAGAAATATTCAGCCATGATA |
| | | | ATTCCCAAGGTGTAAAAACGGCATTTGAAGAACAATTGATGGAAA |
| | | | TTTTGGCAGATATGAAGGAAATCATCCCTTTGTACAATAAGGTTAG |
| | | | AAATTTCGCTACTAAAAAAGCATATTCAGTAGAAAAATTTAAACTT |
| | | | AATTTTAATGTAGCGACATTGGCATCCGGTTGGGATCAGAACAAA |
| | | | GAAAATGCAAATTGTGCAATTATACTTCGAAAGAAGGATATGTAT |
| | | | TATTTGGGTATATATAATTCTTCCAATCAGCCGTTTTTTGAAATAGT |
| | | | CGAGCAAGATGATGACGGGTTTGAAAAGATGATATATAAACAATT |
| | | | TCCCGATTTTAATAAAATGTTACCTAAATGTACAGTATCACGTAAA |
| | | | AATGATGTTGCAGTTCATTTTAATAAGTCTGATGCAGATTTTTTATT |
| | | | AAATGTAAATACGTTCAGTAAACCGCTTCTTATAACTAAAGAAGTC |
| | | | TATGATTTAGGCACTAAAACTGTTCAAGGAAAAAAGAAATTCCAG |
| | | | ATTGATTATAAGAGAAACACTGGGGATGAGGCCGGGTATAAGGCT |
| | | | GCCTTGAAGGCATGGATTGACTTCGGGAAAGAGTTCATAAAGGCT |
| | | | TATGAAAGCACAGCTATATACGATATATCATTGTTACGAAAAAGC |
| | | | GAAGATTATCCCGATATCCAATCTTTTTACAAGGATGTAGACAATA |
| | | | TATGCTATAAAATCGCCTTTCAAAAGATCTCTGATGAAGCAGTAAA |
| | | | TCAATGTGTAGAAAATGGTTCTTTATATCTTTTTAAATTGCACGCC |
| | | | AAGGATTTTTCGCCCGGTGCCAGTGGGAAACCGAATTTACACACG |
| | | | CTGTATTGGAAGTATGTATTTGAAGAAGAAAACTTGAAAGATGTA |
| | | | GTTGTGAAATTAAACGGACAGGCAGAATTGTTTTATCGCCCCCGA |
| | | | AGTTTAACGCAGCCAGTTGTACATAAAAAAGGAGAGAAAATTCTT |
| | | | AATAAAACTACTCGATCGGGAGAACCCGTTCCCGATGACGTATAT |
| | | | GTTGAGTTGTCTCACTTTATTAAAAACGGAAGTACGGGCAATTTGT |
| | | | CGAATGAGGCAAAAAAGTGGCAGGCGAAGGTAAGCGTTCGCAAT |
| | | | GTGCCTCATGAGATTACAAAGGATCGCAGATTTACACAGGATAAA |
| | | | TTCTTTTTCCATGTGCCTCTGACTTTGAATTATAAATCTGCCAATAC |
| | | | ACCCCGGCGCTTTAATGATTTAGTCAAAGCGTATATTAAGAAGAAT |
| | | | CCGGATGTGCATGTCATTGGAATTGACCGGGGCGAACGAAATCTT |
| | | | ATTTATGCAGTTGTTATTGACGGAAAAGGTAAGATTGTTGAACAGC |
| | | | GGTCCTTCAATATCGTAGGGGGCTATAATTACCAAGAAAAATTAT |
| | | | GGCAAAAAGAAAATGAACGGCAGGCAGCGAGACGCGATTGGACC |
| | | | GCTGTCACCACGATTAAGGATTTAAAACAAGGATACCTGTCCGCT |
| | | | GTTGTACATGAGTTATCTAAAATGATAGTGAAGTATAAGGCTATTG |
| | | | TTGTACTTGAAAACCTCAACGCGGGTTTTAAACGTATGCGAGGCG |
| | | | GCATTGCGGAACGATCCGTTTACCAGCAGTTTGAAAAGGCCTTAAT |
| | | | CGATAAATTAAATTATTTAGTTTTTAAAGATGCAGTCCCTGCGGTG |
| | | | CCCGGAGGAGTCTTAAATGCGTATCAATTAACCGACAAATTTGAC |
| | | | AGTTTCAGTAAAATGAACCAGCAAACGGGATTTTTGTTTTACGTGC |
| | | | CCGCAGCTTATACTTCTAAAATTGATCCCTTAACAGGATTTGTAGA |
| | | | TTGTTTTAATTGGAAACAAATAAAGAAAAATACTGAGAGTCGGAA |
| | | | GGCATTTATTGGTTTGTTTGAATCGCTTTGCTATGACGCGAATACG |
| | | | AATAATTTTGTGCTTCATTATAGGCATAAGGCTAACCGATATGTTC |
| | | | GTGGCGGTAATTTGGACATTACGGAATGGGATATACTGATTCAAG |
| | | | AAAATAAAGAAGTAGTAAGTAAAACCGGCAAATCCTATCGCCAAG |
| | | | GGAAACGCATTATCTACAGGAAAGGCTCCGGTAATCATGGGGAAG |
| | | | CGTCTCCCTACTATCCTCACGAAGAACTGCAATCTTTGTTGGAAGA |
| | | | ACATGGAATTTCATATAAAGCAGGCAAGAACATCTTACCCAAGAT |
| | | | TAAAGCCGCTAATGACAACGCATTGGTAGAAAAGTTGCACTACAT |
| | | | TATTAAGGCCGTGCTTCAATTACGCAACAGCAATAGTGAAACCGG |
| | | | AGAGGATTATATCAGTTCTCCCGTTGAAGGCCGCAAAGATTGGTG |
| | | | CTTTGATAGTAGAGCTGCAGATGATGCGTTACCACAAGATGCTGAT |
| | | | GCTAACGGTGCCTTTCATATTGCCATGAAAGGATTGTTATTAATGA |
| | | | AACGGATTCGGAATGATGAAAAGCTTGCAATTAGTAATGAAGATT |
| | | | GGCTGAATTACATACAAGGATTGAGAAGCTAA |
| 487 | ID419 | 14 | ATGCCAAATATTTCTGAATTTAGTGAACATTTTCAAAAGACTTTAA |
| | | | CATTAAGAAACGAGTTAGTACCTGTAGGAAAAACTCTTGAAAACA |
| | | | TCATTTCTTCTAATGTATTGATAAATGATGAAAAAAGAAGTGAAG |
| | | | ACTATAAAAAGGCTAAAGAGATTATAGACTCTTATCATCAAGAGT |
| | | | TTATAGAAAAATCTCTTTCATCTGTAACTGTTGATTGGAATGATTT |
| | | | GTTCTCCTTTTTATCCAGAAAAGAACCAGAAGACTATGAAGAAAA |
| | | | GCAGAAGTTCCTAGAAGAGCTAGAAAGTATTCAGCTTGAAAAGAG |
| | | | AAAAAGCATTGTTAATCAATTTGAACAATATGATTTTGGTTCATAC |
| | | | ACAGATTTAAAGGGAAAGAAAACAAAGGAACTAAGTTTTGAGAG |
| | | | CCTTTTTAAATCGGAGTTATTTGATTTTCTTTTACCTAATTTTATAA |
| | | | AAAATAATGAAGACAAAAAAATAATAAGTAGTTTTAACAAGTTTA |
| | | | CTTCTTACTTTACTGGTTTTTACGAAAATAGAAAGAATTTATATAC |
| | | | ATCAGCACCTTTGCCAACGGCTGTTGCTTACAGAATAGTTAACGAT |
| | | | AACTTTCCTAAATTCATTTCTAACCAAAAGATCTTTCGTGTGTGGA |
| | | | AAGACAATGTTCCTAAGTTTGTAGAAATAGCGAAAACTAAACTAA |
| | | | GAGAAAAAGGTATTTCTGATTTAAATTTAGAATTTCAATTTGAGTT |
| | | | ATCAAATTTCAATTCATGTTTAAATCAAACAGGAATTGATTCTTAC |
| | | | AATGAACTGATAGGTCAACTAAACTTTGCAATTAACCTTGAATGTC |
| | | | AGCAAGACAAGAATTTAAGTGAGCTTTTAAGGAAGAAAAGAAGCC |
| | | | TTAAAATGATACCTCTGTATAAACAGATTTTATCAGATAAAGACTC |
| | | | TTCATTCTGCATTGACGAATTTGAAAATGATGAATCAGCGATAAAT |
| | | | GATGTTATTTCTTTTTATAAGAAAGCGGTTTGTGAAAACGGTCCTC |
| | | | AACGAAAACTATCCGAATTATTACGTGATTTGTCATCTCACGATCT |
| | | | TGATAAGATATTTATTCAAGGTAAAAACTTAAATTCAATTTCTAAA |
| | | | AATTTATTTGGAGGAAAAAACTGGTCTTTACTCAGAGATGCCATTA |
| | | | TTGCAGAAAAGTCAAAAGACAAAAGCTATAAAAAGGCTATAAAG |
| | | | ACAAATCCTTCATCAGACGATCTTGACAGAATTCTATCTAAAGATG |
| | | | AATTTTCAATTTCATACTTATCAAAGGTATGCGGAAAAGATTTGTG |
| | | | CGAAGAAATTGATAAATTTATTAAAAATCAAGATGAACTGTTAAT |
| | | | TAAAATAAATTCACAAGCTTGGCCAAGCTCTCTTAAGAATAGTGA |
| | | | CGAGAAAAATCTCATAAAATCACCATTAGATTTCTTGTTAAATTTT |
| | | | TATAGATTTGCTCAGGCATTTTCTTCAAATAATACAGATAAGGATA |
| | | | TGTCTTTATATGCCGATTATGATGTATCTTTATCTTTATTGGTCTCT |
| | | | GTAATAGGTCTTTATAACAAAGTTAGAAACTATGCAACCAAGAAG |
| | | | CCTTATAGTCTTGAAAAAATCAAATTAAATTTTGAAAATCCAAACT |
| | | | TAGCAACAGGTTGGAGTGAAAACAAAGAAAATGATTGTTTATCAG |
| | | | TAATCTTATTAAAAAATCAAATTTACTATTTAGGTATTTTAAACAA |
| | | | AAGTAATAAACCTAATTTTTCTAATGGTATTTCTCAACAACCTTCTT |
| | | | CAGAAAGCTGCTATAAAAAGATGAGATACTTATTATTCAAAGGAT |
| | | | TCAATAAAATGTTACCTAAATGTGCTTTTACAGGAGAAGTAAAAG |
| | | | AGCATTTTAAGGAATCTTCTGAAGATTATCATCTTTATAACAAGGA |
| | | | TACTTTTGTTTATCCTCTTGTTATTAACAAAGAGATTTTTGATCTAG |
| | | | CATGCAGTACAGAAAAAGTAAAAAAATTTCAAAAAGCATATGAAA |
| | | | AGGTCAACTATGCAGAATATAGGCAATCACTGATAAAGTGGATTT |
| | | | CTTTTGGCCTTGAATTTTTATCTGCATACAAAACTACATCTCAATTT |
| | | | GATTTATCAAATTTAAGAAAACCTGAAGAATATAGCGATCTAAAA |
| | | | GAATTTTATGAAGATGTAGACAATCTAACATACAAGATAGAATTA |
| | | | GTAGATTTAAAAGAAGAATATGTAGACTCTTTGGTTGAAAATGGG |
| | | | CAACTGTTTTTATTCGAAATAAGAAATAAAGATTTTGCAAAAAAAT |
| | | | CTAGTGGAACTCCTAATTTACATACTCTTTATTTTAAAAGCATATTT |
| | | | GATCCGAGAAATTTAAAAAATTGTATTGTCAAACTTAATGGTGAA |
| | | | GCCGAGATTTTCTACAGAAAGAAAAGCTTGAAGATTGATGACATA |
| | | | ACAGTTCATCAAAAAGGAAGTTGCCTTGTTAATAAAGTTTTCTTCA |
| | | | ATCCTGATTCTGGCAAATCCGAGCAGATCCCAGACAAAATCTATA |
| | | | ACAATATTTATGCATATGTTAATGGCAAATCAACAACTTTATCAAA |
| | | | AGAAGATGAGTTTTTTTACACAAAAGCCACAATAAAAAAAGCAAC |
| | | | TCACGAGATCGTAAAAGATAAACGCTTTACTGTGGATAAATTCTTT |
| | | | TTCCACTGCCCAATTACGATTAACTATAAATCTAAAGATAAGCCAA |
| | | | CTAAATTTAATGACAGAGTATTAGATTTCTTAAGAAAGAATGAAG |
| | | | ATATCAACATTATTGGAATAGATCGAGGTGAGAGAAATCTTATCT |
| | | | ATGCAACTGTAATTAATCAAAAAGGTGAAATTATTGATTGCAGAT |
| | | | CTTTTAATACAATCAAGCACCAGTCTTCATCTGTAAATTATGATGT |
| | | | AGATTATCACAATAAATTGCAAGAAAGAGAAAATAATAGAAAAG |
| | | | AAGAAAAGAGATCTTGGAACAGTATTTCTAAAATTGCAGACCTTA |
| | | | AAGAAGGATATCTTTCAGCTGTAATTCATGAGATAGCATTAATGAT |
| | | | GGTTAAATACAATGCTATTGTTGTTATGGAAAATTTGAATCAAGGC |
| | | | TTTAAGAGAATCAGAGGCGGAATCGCTGAAAGATCTGTGTACCAA |
| | | | AAATTTGAGAAAATGCTGATAGATAAACTTAATTATTTTGTTATTA |
| | | | AAAATGAGAATTGGACAAATCCTGGAGGAGTTCTCAATGGTTATC |
| | | | AGTTGACAAACAAGGTATCAACAATCAAAGAAATTGGTAATCAAT |
| | | | GTGGTTTTTTATTCTACGTACCTGCAGCATATACTTCAAAGATAGA |
| | | | TCCTTCAACTGGTTTTGTTAATTTGTTGAATTTCAATAAATACAATA |
| | | | ACTCAGATAAACGAAGAGAGCTTATTTGCAAATTTTACGAGATTTG |
| | | | TTATGTGCAAAATGAGAATTTATTTAAATTTTCTATAGATTATGGA |
| | | | AAATTATGCCCTGATAGCAAAATACCTGTAAAAAAATGGGATATT |
| | | | TTCTCTTATGGGAAAAGAATTGTTAAGGAAGATCTAAAGACTGGTT |
| | | | ATATGAAAGAAAATCCAGAATACGATCCAACTGAAGAACTTAAGA |
| | | | ATTTGTTTACATTAATGAGGGTTGAGTATAAAAAAGGTGAAAATA |
| | | | TACTTGAAACAATATCTATCAGAGACATGAGTAGAGAATTTTGGA |
| | | | ATTCTCTTTTCAAGATTTTCAAAGCTATATTACAAATGAGAAATAG |
| | | | TCTAACTAATTCACCGGTAGACAGACTTTTATCTCCAGTAAAGGGA |
| | | | AAAGATGCAACCTTCTTTGATACAGATAAAGTTGATGGAACTAAA |
| | | | TTTGAAAAATTAAAAGATGCTGATGCAAATGGAGCTTATAACATT |
| | | | GCATTAAAAGGCTTATTAATTCTCAAAAATAATGATTCTGTAAAGA |
| | | | CAGACAAAGAACTAAAAAATGTAAAGAAGGTAAGTCTTGAGGATT |
| | | | GGTTAAAGTTTGTTCAAATCTCCTTAAGAGGATAA |

TABLE S15C
Corresponding Guide Sequences Group 15

| SEQ ID NO | Associated Cas12a protein |
|---|---|
| 355-360 | ID405 |
| 69-71 | ID414 |
| 355-360 | ID406 |
| 355-360 | ID411 |
| 28-29 | ID415 |
| 542-563 | ID419 |

### Numbered Paragraphs

[2885] Without limitation, the following numbered paragraphs are contemplated by the instant specification and disclosure.

[2886] Paragraph 1. An isolated or recombinant polynucleotide comprising or consisting of a nucleic acid sequence selected from the group consisting of:
[2887] (a) a nucleic acid sequence that encodes a polypeptide having the amino acid sequence of: (Group 1) SEQ ID NO:1-3; (Group 2) SEQ ID NO:20-21; (Group 3) SEQ ID NO:32-33; (Group 4) SEQ ID NO:45-46; (Group 5) SEQ ID NO:57-59; (Group 6) SEQ ID NO:76-79; (Group 7) SEQ ID NO:100-102; (Group 8) SEQ ID NO:118-119; (Group 9) SEQ ID NO:131-170; (Group 10) SEQ ID NO:331-340; (Group 11) SEQ ID NO:368-370; (Group 12) SEQ ID NO:386-387; (Group 13) SEQ ID NO:399-404; and (Group 14) SEQ ID NO:436-456;
[2888] (b) a nucleic acid sequence that encodes a polypeptide at least 50%, at least 55%, at least 60%, at least 65%, at least 70%, at least 75%, at least 80%, at least 85%, at least 90%, at least 91%, at least 92%, at least 93%, at least 94%, at least 95%, at least 96%, at least 97%, at least 98%, at least 99%%, at least 99.1%, at least 99.2%, at least 99.3%, at least 99.4%, at least 99.5%, at least 99.6%, at least 99.7%, at least 99.8% or at least 99.9% identical to: (Group 1) SEQ ID NO:1-3; (Group 2) SEQ ID NO:20-21; (Group 3) SEQ ID NO:32-33; (Group 4) SEQ ID NO:45-46; (Group 5) SEQ ID NO:57-59; (Group 6) SEQ ID NO:76-79; (Group 7) SEQ ID NO:100-102; (Group 8) SEQ ID NO:118-119; (Group 9) SEQ ID NO:131-170; (Group 10) SEQ ID NO:331-340; (Group 11) SEQ ID NO:368-370; (Group 12) SEQ ID NO:386-387; (Group 13) SEQ ID NO:399-404; and (Group 14) SEQ ID NO:436-456;
[2889] (c) a codon optimized nucleotide sequence selected from (Group 1) SEQ ID NO:4; (Group 2) SEQ ID NO:22; (Group 3) SEQ ID NO:34; (Group 4) SEQ ID NO:47; (Group 5) SEQ ID NO:60; (Group 6) SEQ ID NO:80; (Group 7) SEQ ID NO:103-105; (Group 8) SEQ ID NO:120; (Group 9) SEQ ID NO:171-173, 180, 189, 198, 201, and 208; (Group 10) SEQ ID NO:338; (Group 11) SEQ ID NO:373; (Group 12) SEQ ID NO:388; (Group 13) SEQ ID NO:405-406; and (Group 14) SEQ ID NO:457;
[2890] (d) a nucleic acid sequence at least 50%, at least 55%, at least 60%, at least 65%, at least 70%, at least 75%, at least 80%, at least 85%, at least 90%, at least 91%, at least 92%, at least 93%, at least 94%, at least 95%, at least 96%, at least 97%, at least 98%, at least 99%%, at least 99.1%, at least 99.2%, at least 99.3%, at least 99.4%, at least 99.5%, at least 99.6%, at least 99.7%, at least 99.8% or at least 99.9% identical to a sequence selected from (Group 1) SEQ ID NO:17-19; (Group 2) SEQ ID NO:30; (Group 3) SEQ ID NO:43-44; (Group 4) SEQ ID NO:47; (Group 5) SEQ ID NO:73-75; (Group 6) SEQ ID NO:96-99; (Group 7) SEQ ID NO:103-105; (Group 8) SEQ ID NO:129-130; (Group 9) SEQ ID NO:171-173, 180, 189, 198, 201, and 208; (Group 10) SEQ ID NO:362, 364-367; (Group 11) SEQ ID NO:373; (Group 12) SEQ ID NO:397-398; (Group 13) SEQ ID NO:430-435; and (Group 14) SEQ ID NO:482, 484-485, 487-490, and 492;
[2891] (e) a nucleic acid sequence encoding a polypeptide having a consensus amino acid sequence generated from (Group 1) SEQ ID NO:1-3; (Group 2) SEQ ID NO:20-21; (Group 3) SEQ ID NO:32-33; (Group 4) SEQ ID NO:45-46; (Group 5) SEQ ID NO:57-59; (Group 6) SEQ ID NO:76-79; (Group 7) SEQ ID NO:100-102; (Group 8) SEQ ID NO:118-119; (Group 9) SEQ ID NO:131-170; (Group 10) SEQ ID NO:331-340; (Group 11) SEQ ID NO:368-370; (Group 12) SEQ ID NO:386-387; (Group 13) SEQ ID NO:399-404; and (Group 14) SEQ ID Nos:436-456;
[2892] (f) a nucleic acid sequence that is a degenerate variant of the nucleic acid sequence in (a), (b), (c), (d) or (e); and
[2893] (g) a nucleic acid sequence that hybridizes under stringent conditions to the nucleic acid sequence in in (a), (b), (c), (d) or (e).

[2894] Paragraph 2. The isolated or recombinant nucleic acid sequence of paragraph 1, wherein the nucleic acid sequence encodes a polypeptide having at least one activity selected from endonuclease activity; endoribonuclease activity, or RNA-guided DNase activity.

[2895] Paragraph 3. The isolated or recombinant nucleic acid sequence of Paragraph 1, wherein the nucleic acid sequence comprises
[2896] a. one or more α-helical recognition lobe (REC) and a nuclease lobe (NUC);
[2897] b. a Wedge (WED), α-helical recognition lobe (REC), PAM-interacting (PI), RuvC nuclease, Bridge Helix (BH) and NUC domains; or
[2898] c. one or more domains selected from RuvC, REC, WED, BH, PI and NUC domains.

[2899] Paragraph 4. The isolated or recombinant nucleic acid sequence of Paragraph 1, wherein the nucleic acid sequence encodes a polypeptide that recognizes or binds to a targeted polynucleotide sequence.

[2900] Paragraph 5. The isolated or recombinant nucleic acid sequence of Paragraph 1, wherein the nucleic acid sequence encodes a polypeptide that cleaves a targeted polynucleotide sequence.

[2901] Paragraph 6. The isolated or recombinant nucleic acid sequence of Paragraph 1, wherein the nucleic acid sequence encodes a polypeptide that recognizes or binds crRNAs.

[2902] Paragraph 7. The isolated or recombinant nucleic acid sequence of Paragraph 6, wherein the crRNA is:
[2903] a. derived from one or more direct repeat sequences, or a reverse complement selected from: (Group 1) SEQ ID NO:7-12; (Group 2) SEQ ID NO:24-27; (Group 3) SEQ ID NO:36-39; (Group 4) SEQ ID NO:49-52; (Group 5) SEQ ID NO:63-68; (Group 6) SEQ ID NO:84-91; (Group 7) SEQ ID NO:106-111; (Group 8) SEQ ID NO:122-125; (Group 9) SEQ ID Nos:211-290; (Group 10) SEQ ID NO:343-354; (Group 11) SEQ ID NO:374-379; (Group 12) SEQ ID NO:390-393; (Group 13) SEQ ID NO:411-422; and (Group 14) SEQ ID NO:500-541;
[2904] b. the direct repeat sequences of a. with 20 to 35 nucleotides, 12 to 40 nucleotides, or up to the length of the crRNA from the 3′ end of the direct repeat, wherein the direct repeat sequences are linked to a targeting guide linked to the 3′ end of the direct repeat sequence that is of 16-30 nucleotides in length; or
[2905] c. (Group 1) SEQ ID NO:13-15; (Group 2) SEQ ID NO:28-29; (Group 3) SEQ ID NO:40-41; (Group 4) SEQ ID NO:53-54; (Group 5) SEQ ID NO:69-71; (Group 6) SEQ ID NO:92-95; (Group 7) SEQ ID NO:112-114; (Group 8) SEQ ID NO:126-127; (Group 9) SEQ ID NO:291-330; (Group 10) SEQ ID NO:355-360; (Group 11) SEQ ID NO:380-382; (Group 12) SEQ ID NO:394-395; (Group 13) SEQ ID NO:423-428; and (Group 14) SEQ ID NO:542-563.

[2906] Paragraph 8. The isolated or recombinant nucleic acid sequence of Paragraph 1, wherein the nucleic acid sequence encodes a polypeptide that modifies one or more genomes.

[2907] Paragraph 9. The isolated or recombinant nucleic acid sequence of Paragraph 8, wherein the modification comprises genome editing.

[2908] Paragraph 10. The isolated or recombinant nucleic acid sequence of Paragraph 1, wherein the polypeptide comprises one or more mutations.

[2909] Paragraph 11. The isolated or recombinant nucleic acid sequence of Paragraph 10, wherein the mutation is selected from one or more RuvC, REC, WED, BH, PI and NUC domains.

[2910] Paragraph 12. The isolated or recombinant nucleic acid sequence of Paragraph 1, 10 or 11, wherein the nucleic acid sequence encodes a polypeptide comprising a nickase activity.

[2911] Paragraph 13. The isolated or recombinant nucleic acid sequence of Paragraph 1, 10 or 11, wherein the nucleic acid sequence encodes a nuclease-deficient polypeptide.

[2912] Paragraph 14. The isolated or recombinant nucleic acid sequence of Paragraph 12 or 13, wherein the nucleic acid sequence is operably fused to a nucleic acid encoding one or more deaminases.

[2913] Paragraph 15. The isolated or recombinant nucleic acid sequence of Paragraph 14, wherein the one or more deaminases is selected from adenine deaminase or cytosine deaminase.

[2914] Paragraph 16. The isolated or recombinant nucleic acid sequence of Paragraph 15, wherein the deaminases modify a targeted polynucleotide sequence.

[2915] Paragraph 17. The isolated or recombinant nucleic acid sequence of Paragraph 16, wherein the modification comprises base editing.

[2916] Paragraph 18. The isolated or recombinant nucleic acid sequence of Paragraph 12 or 13, wherein
[2917] a. the nucleic acid sequence encoding the polypeptide comprising a nickase activity; or
[2918] b. the nucleic acid sequence encoding a nuclease-deficient polypeptide, is operably fused to a nucleic acid sequence encoding one or more reverse transcriptases.

[2919] Paragraph 19. The isolated or recombinant nucleic acid sequence of Paragraph 12 or 13, wherein
[2920] a. the nucleic acid sequence encoding the polypeptide comprising a nickase activity; or
[2921] b. the nucleic acid sequence encoding a nuclease-deficient polypeptide, is not operably fused to a nucleic acid sequence encoding one or more reverse transcriptases.

[2922] Paragraph 20. The isolated or recombinant nucleic acid sequence of Paragraph 18 or 19, further comprising a prime editing guide RNA (pegRNA).

[2923] Paragraph 21. The isolated or recombinant nucleic acid sequence of Paragraph 20, wherein the pegRNA hybridizes to a targeted polynucleotide sequence and acts as a primer to the one or more reverse transcriptases.

[2924] Paragraph 22. The isolated or recombinant nucleic acid sequence of Paragraph 20, wherein the pegRNA binds to a nicked strand for initiation of repair through one or more reverse transcriptases.

[2925] Paragraph 23. The isolated or recombinant nucleic acid sequence of Paragraph 1, further comprising a donor polynucleotide.

[2926] Paragraph 24. The isolated or recombinant nucleic acid sequence of Paragraph 1, wherein the nucleic acid sequence is operably linked to a nucleic acid sequence encoding one or more nuclear localization signals.

[2927] Paragraph 25. The isolated or recombinant nucleic acid sequence of Paragraph 1, wherein the nucleic acid sequence is operably linked to one or more expression control sequences.

[2928] Paragraph 26. The isolated or recombinant nucleic acid sequence of Paragraph 1, wherein the expression control sequences comprise one or more transcriptional activators or repressors.

[2929] Paragraph 27. The isolated or recombinant nucleic acid sequence of any one of the above Paragraphs wherein the polypeptide comprises improved genome editing characteristics selected from efficiency, specificity, precision, intended edits:unintended edits, indels relative to Cas9.

[2930] Paragraph 28. A vector comprising the isolated or recombinant nucleic acid sequence of any one of Paragraphs 1-27.

[2931] Paragraph 29. The vector of Paragraph 28, wherein the vector is selected from viral vectors comprising a retroviral vector, a lentiviral vector, an adenoviral, an adeno-associated viral vector, vaccinia viral vector, poxviral vector, and herpes simplex viral vector

[2932] Paragraph 30. The vector of Paragraph 28, wherein the vector is selected from a non-viral vectors comprising liposomes, lipid nanoparticles (LNPs), cationic polymers, vesicles, and gold nanoparticles.

[2933] Paragraph 31. A host cell comprising the isolated or recombinant nucleic acid sequence of Paragraph 28.

[2934] Paragraph 32. The host cell of Paragraph 31, wherein the host cell is selected from one or more prokaryotic cells, mammalian cells, human cells or synthetic cells.

[2935] Paragraph 33. The host cell of Paragraph 31, wherein the host cell produces a site-specific modification of a targeted nucleic acid sequence of a host cell genome.

[2936] Paragraph 34. A polypeptide encoded by the isolated or recombinant nucleic acid sequence of any one of Paragraphs 1-34.

[2937] Paragraph 35. A fusion protein comprising an isolated polypeptide encoded by an isolated or recombinant nucleic acid sequence of Paragraph 1 fused to a heterologous amino acid sequence.

[2938] Paragraph 36. The fusion protein of Paragraph 35 wherein the fusion protein comprises a nuclease-deficient polypeptide.

[2939] Paragraph 37. An isolated or recombinant guide RNA comprising or consisting of a nucleic acid sequence selected from the group consisting of:
[2940] (a) one or more crRNA direct repeat sequences or a reverse complement selected from: (Group 1) SEQ ID NO:7-12; (Group 2) SEQ ID NO:24-27; (Group 3) SEQ ID NO:36-39; (Group 4) SEQ ID NO:49-52; (Group 5) SEQ ID NO:63-68; (Group 6) SEQ ID NO:84-91; (Group 7) SEQ ID NO:106-111; (Group 8) SEQ ID NO:122-125; (Group 9) SEQ ID Nos:211-290; (Group 10) SEQ ID NO:343-354; (Group 11) SEQ ID NO:374-379; (Group 12) SEQ ID NO:390-393; (Group 13) SEQ ID NO:411-422; and (Group 14) SEQ ID NO:500-541;
[2941] (b) the direct repeat sequences of (a) with 20 to 35 nucleotides, 12 to 40 nucleotides, or up to the length of the crRNA from the 3′ end of the direct repeat, wherein the direct repeat sequences are linked to a targeting guide linked to the 3′ end of the direct repeat sequence that is of 16-30 nucleotides in length;
[2942] (c) (Group 1) SEQ ID NO:13-15; (Group 2) SEQ ID NO:28-29; (Group 3) SEQ ID NO:40-41; (Group 4) SEQ ID NO:53-54; (Group 5) SEQ ID NO:69-71; (Group 6) SEQ ID NO:92-95; (Group 7) SEQ ID NO:112-114; (Group 8) SEQ ID NO:126-127; (Group 9) SEQ ID NO:291-330; (Group 10) SEQ ID NO:355-360; (Group 11) SEQ ID NO:380-382; (Group 12) SEQ ID NO:394-395; (Group 13) SEQ ID NO:423-428; and (Group 14) SEQ ID NO:542-563

[2943] (d) a nucleic acid sequence that is a degenerate variant of: (Group 1) SEQ ID NO:13-15; (Group 2) SEQ ID NO:28-29; (Group 3) SEQ ID NO:40-41; (Group 4) SEQ ID NO:53-54; (Group 5) SEQ ID NO:69-71; (Group 6) SEQ ID NO:92-95; (Group 7) SEQ ID NO:112-114; (Group 8) SEQ ID NO:126-127; (Group 9) SEQ ID NO:291-330; (Group 10) SEQ ID NO:355-360; (Group 11) SEQ ID NO:380-382; (Group 12) SEQ ID NO:394-395; (Group 13) SEQ ID NO:423-428; and (Group 14) SEQ ID NO:542-563
[2944] (e) a nucleic acid sequence at least 70%, at least 71%, at least 72%, at least 73%, at least 74%, at least 75%, at least 76%, at least 77%, at least 78%, at least 79%, at least 80%, at least 81%, at least 82%, at least 83%, at least 84%, at least 85%, at least 90%, at least 95%, at least 98%, at least 99% or at least 99.9% identical to: (Group 1) SEQ ID NO:13-15; (Group 2) SEQ ID NO:28-29; (Group 3) SEQ ID NO:40-41; (Group 4) SEQ ID NO:53-54; (Group 5) SEQ ID NO:69-71; (Group 6) SEQ ID NO:92-95; (Group 7) SEQ ID NO:112-114; (Group 8) SEQ ID NO:126-127; (Group 9) SEQ ID NO:291-330; (Group 10) SEQ ID NO:355-360; (Group 11) SEQ ID NO:380-382; (Group 12) SEQ ID NO:394-395; (Group 13) SEQ ID NO:423-428; and (Group 14) SEQ ID NO:542-563; and

[2945] (f) a nucleic acid sequence that hybridizes under stringent conditions to: (Group 1) SEQ ID NO:13-15; (Group 2) SEQ ID NO:28-29; (Group 3) SEQ ID NO:40-41; (Group 4) SEQ ID NO:53-54; (Group 5) SEQ ID NO:69-71; (Group 6) SEQ ID NO:92-95; (Group 7) SEQ ID NO:112-114; (Group 8) SEQ ID NO:126-127; (Group 9) SEQ ID NO:291-330; (Group 10) SEQ ID NO:355-360; (Group 11) SEQ ID NO:380-382; (Group 12) SEQ ID NO:394-395; (Group 13) SEQ ID NO:423-428; and (Group 14) SEQ ID NO:542-563.

[2946] Paragraph 38. A guide RNA comprising the crRNA of Paragraph 37.

[2947] Paragraph 39. The guide RNA of Paragraph 38 wherein the crRNA hybridizes to the targeted polynucleotide sequence.

[2948] Paragraph 40. A genome editing system comprising:
[2949] a. one or more polypeptide sequences comprising at least 45%, 46%, 47%, 48%, 49%, 50%, 51%, 52%, 53%, 54%, 55%, 56%, 57%, 58%, 59%, 60%, 61%, 62%, 63%, 64%, or 65% sequence identity to any one of sequences selected from SEQ ID NOs: 1-3; SEQ ID NO: 16; and
[2950] b. one or more polynucleotide sequences comprising a guide RNA, wherein the guide RNA comprises a complementary sequence to that of a targeted polynucleotide sequence.

[2951] Paragraph 41. The genome editing system of Paragraph 40, wherein the one or more polypeptide sequences comprise nuclease activity, endonuclease activity, endoribonuclease activity and/or RNA-guided DNase activity.

[2952] Paragraph 42. The genome editing system of Paragraph 40, wherein the guide RNA hybridizes to the targeted polynucleotide sequence.

[2953] Paragraph 43. The genome editing system of Paragraph 40, wherein the guide RNA comprises 12-40 nucleotides.

[2954] Paragraph 44. The genome editing system of Paragraph 40, wherein the targeted polynucleotide sequence comprises one or more protospacer adjacent motif (PAM) recognition domains selected from 5′-TTTN-3′, 5′-TTN-3′, 5′-TNN-3′, 5′-TTV-3′, or 5′-TTTV-3′, wherein N=A, T, C or G and V=A, C or G.

[2955] Paragraph 45. The genome editing system of Paragraph 40, wherein the targeted polynucleotide sequence comprises one or more relaxed PAM recognition domains.

[2956] Paragraph 46. The genome editing system of Paragraph 40, wherein the one or more polypeptide sequences and the one or more polynucleotide sequences comprising a guide RNA form a ribonucleoprotein complex.

[2957] Paragraph 47. The genome editing system of Paragraph 40, wherein the one or more polypeptide sequences comprise
[2958] a. one or more α-helical recognition lobe (REC) and a nuclease lobe (NUC);
[2959] b. a Wedge (WED), α-helical recognition lobe (REC), PAM-interacting (PI), RuvC nuclease, Bridge Helix (BH) and NUC domains; or
[2960] c. one or more domains selected from RuvC, REC, WED, BH, PI and NUC domains.

[2961] Paragraph 48. The genome editing system of Paragraph 47, wherein the REC lobe comprises REC1 and REC2 domains.

[2962] Paragraph 49. The genome editing system of Paragraph 47, wherein the NUC lobe comprises the RuvC, PI, WED, and Bridge Helix (BH) domains.

[2963] Paragraph 50. The genome editing system of Paragraph 47, wherein the one or more polypeptide sequences lack a HNH endonuclease domain.

[2964] Paragraph 51. The genome editing system of Paragraph 40, wherein the system is characterized as a Class 2, Type V Cas endonuclease.

[2965] Paragraph 52. The genome editing system of Paragraph 40, wherein the guide RNA comprises
[2966] (a) one or more crRNA direct repeat sequences or a reverse complement selected from: (Group 1) SEQ ID NO:7-12; (Group 2) SEQ ID NO:24-27; (Group 3) SEQ ID NO:36-39; (Group 4) SEQ ID NO:49-52; (Group 5) SEQ ID NO:63-68; (Group 6) SEQ ID NO:84-91; (Group 7) SEQ ID NO:106-111; (Group 8) SEQ ID NO:122-125; (Group 9) SEQ ID Nos:211-290; (Group 10) SEQ ID NO:343-354; (Group 11) SEQ ID NO:374-379; (Group 12) SEQ ID NO:390-393; (Group 13) SEQ ID NO:411-422; and (Group 14) SEQ ID NO:500-541;
[2967] (b) the direct repeat sequences of (a) with 20 to 35 nucleotides, 12 to 40 nucleotides, or up to the length of the crRNA from the 3′ end of the direct repeat, wherein the direct repeat sequences are linked to a targeting guide linked to the 3′ end of the direct repeat sequence that is of 16-30 nucleotides in length;
[2968] (c) (Group 1) SEQ ID NO:13-15; (Group 2) SEQ ID NO:28-29; (Group 3) SEQ ID NO:40-41; (Group 4) SEQ ID NO:53-54; (Group 5) SEQ ID NO:69-71; (Group 6) SEQ ID NO:92-95; (Group 7) SEQ ID NO:112-114; (Group 8) SEQ ID NO:126-127; (Group 9) SEQ ID NO:291-330; (Group 10) SEQ ID NO:355-360; (Group 11) SEQ ID NO:380-382; (Group 12) SEQ ID NO:394-395; (Group 13) SEQ ID NO:423-428; and (Group 14) SEQ ID NO:542-563;
[2969] (d) a nucleic acid sequence that is a degenerate variant of: (Group 1) SEQ ID NO:13-15; (Group 2) SEQ ID NO:28-29; (Group 3) SEQ ID NO:40-41; (Group 4) SEQ ID NO:53-54; (Group 5) SEQ ID NO:69-71; (Group 6) SEQ ID NO:92-95; (Group 7) SEQ ID NO:112-114; (Group 8) SEQ ID NO:126-127; (Group 9) SEQ ID NO:291-330; (Group 10) SEQ ID NO:355-360; (Group 11) SEQ ID NO:380-382; (Group 12) SEQ ID NO:394-395; (Group 13) SEQ ID NO:423-428; and (Group 14) SEQ ID NO:542-563;
[2970] (e) a nucleic acid sequence at least 70%, at least 71%, at least 72%, at least 73%, at least 74%, at least 75%, at least 76%, at least 77%, at least 78%, at least 79%, at least 80%, at least 81%, at least 82%, at least 83%, at least 84%, at least 85%, at least 90%, at least 95%, at least 98%, at least 99% or at least 99.9% identical to: (Group 1) SEQ ID NO:13-15; (Group 2) SEQ ID NO:28-29; (Group 3) SEQ ID NO:40-41; (Group 4) SEQ ID NO:53-54; (Group 5) SEQ ID NO:69-71; (Group 6) SEQ ID NO:92-95; (Group 7) SEQ ID NO:112-114; (Group 8) SEQ ID NO:126-127; (Group 9) SEQ ID NO:291-330; (Group 10) SEQ ID NO:355-360; (Group 11) SEQ ID NO:380-382; (Group 12) SEQ ID NO:394-395; (Group 13) SEQ ID NO:423-428; and (Group 14) SEQ ID NO:542-563; and
[2971] (f) a nucleic acid sequence that hybridizes under stringent conditions to: (Group 1) SEQ ID NO:13-15; (Group 2) SEQ ID NO:28-29; (Group 3) SEQ ID NO:40-41; (Group 4) SEQ ID NO:53-54; (Group 5) SEQ ID NO:69-71; (Group 6) SEQ ID NO:92-95; (Group 7) SEQ ID NO:112-114; (Group 8) SEQ ID NO:126-127; (Group 9) SEQ ID NO:291-330; (Group 10) SEQ ID NO:355-360; (Group 11) SEQ ID NO:380-382; (Group 12) SEQ ID NO:394-395; (Group 13) SEQ ID NO:423-428; and (Group 14) SEQ ID NO:542-563.

[2972] Paragraph 53. The genome editing system of Paragraph 52, wherein the crRNA comprises about 15-nucleotides or direct repeat sequences comprising about 20-30 nucleotides.

[2973] Paragraph 54. The genome editing system of Paragraph 52, wherein the direct repeat is selected from: (Group 1) SEQ ID NO:7-12; (Group 2) SEQ ID NO:24-27; (Group 3) SEQ ID NO:36-39; (Group 4) SEQ ID NO:49-52; (Group 5) SEQ ID NO:63-68; (Group 6) SEQ ID NO:84-91; (Group 7) SEQ ID NO:106-111; (Group 8) SEQ ID NO:122-125; (Group 9) SEQ ID Nos:211-290; (Group 10) SEQ ID NO:343-354; (Group 11) SEQ ID NO:374-379; (Group 12) SEQ ID NO:390-393; (Group 13) SEQ ID NO:411-422; and (Group 14) SEQ ID NO:500-541.

[2974] Paragraph 55. The genome editing system of Paragraph 52, wherein the crRNA comprises a guide segment of 16-26 nucleotides or 20-24 nucleotides.

[2975] Paragraph 56. The genome editing system of Paragraph 52 wherein the crRNA hybridizes to the targeted polynucleotide sequence.

[2976] Paragraph 57. The genome editing system of Paragraph 40, wherein the guide RNA comprises one or more chemical modifications selected from 2′-O-Me, 2′-F, and 2′F-ANA at 2′OH; 2′F-4′-Cα-OMe and 2′,4′-di-Cα-OMe at 2′ and 4′ carbons; phosphodiester modifications comprising sulfide-based Phosphorothioate (PS) or acetate-based phosphonoacetate alterations; combinations of the ribose and phosphodiester modifications; locked nucleic acid (LNA), bridged nucleic acids (BNA), S-constrained ethyl (cEt), and unlocked nucleic acid (UNA); modifications to produce a phosphodiester bond between the 2′ and 5′ carbons (2′,5′-RNA) of adjacent RNAs; and a butane 4-carbon chain link between adjacent RNAs.

[2977] Paragraph 58. The genome editing system of any one of Paragraphs 40-57 comprising one or more viral vectors selected from a retroviral vector, a lentiviral vector, an adenoviral, an adeno-associated viral vector, vaccinia viral vector, poxviral vector, and herpes simplex viral vector.

[2978] Paragraph 59. The genome editing system of any one of Paragraphs 40-57 comprising one or more non-viral vectors selected from liposomes, lipid nanoparticles (LNPs), cationic polymers, vesicles, and gold nanoparticles.

[2979] Paragraph 60. The genome editing system of any one of Paragraphs 40-59, wherein the guide RNA modifies the targeted polynucleotide sequence of a host cell genome.

[2980] Paragraph 61. The genome editing system of Paragraph 60, wherein the targeted polynucleotide sequence is modified by an insertion, deletion or alteration of one or more base pairs at the targeted polynucleotide sequence in the host cell genome.

[2981] Paragraph 62. The genome editing system of Paragraph 40, wherein the system further comprises one or more donor nucleic acid sequences wherein the donor nucleic acid sequence comprises: one or more desired modification sequence flanked by two sequences homologous to one or more targeted polynucleotide sequence of a host cell genome, wherein the system recognizes and/or cleaves the targeted polynucleotide sequence of the host cell genome.

[2982] Paragraph 63. The genome editing system of Paragraph 62, wherein the donor nucleic acid sequence repairs the targeted polynucleotide sequence of the host cell genome cleaved by polypeptide.

[2983] Paragraph 64. The genome editing system of any one of Paragraphs 40-62, wherein the one or more polypeptide sequences comprise about 900, about 1000, about 1100, about 1200, about 1300, about 1400 or about 1500 amino acid residues.

[2984] Paragraph 65. The genome editing system of any one of Paragraphs 40-64, wherein the system is characterized in enhanced efficiency and precision of site-directed integration.

[2985] Paragraph 66. The genome editing system of Paragraph 65, wherein the efficiency and precision of site-directed integration is enhanced by staggered overhangs on the donor nucleic acid sequence.

[2986] Paragraph 67. The genome editing system of Paragraph 40, wherein the polypeptide sequences comprise at least one activity selected from endonuclease activity; endoribonuclease activity, or RNA-guided DNase activity.

[2987] Paragraph 68. The genome editing system of Paragraph 40, wherein the system is characterized in exhibiting reduced off-target effects relative to Cas9.

[2988] Paragraph 69. The genome editing system of Paragraph 40, wherein the targeted polynucleotide sequence and/or a non-target DNA strand is cleaved is cleaved by the RuvC domain of the polypeptide.

[2989] Paragraph 70. The genome editing system of Paragraph 40, wherein the system comprises multiple copies of guide RNA expressed in a host cell.

[2990] Paragraph 71. The genome editing system of Paragraph 40, wherein the polypeptide comprises one or more mutations.

[2991] Paragraph 72. The genome editing system of Paragraph 71, wherein the mutation is selected from one or more domains selected from RuvC, REC, WED, BH, PI and NUC domains.

[2992] Paragraph 73. The genome editing system of Paragraph 71, wherein the mutation in the nucleic acid sequence encodes a nuclease-deficient polypeptide.

[2993] Paragraph 74. The genome editing system of Paragraph 71, comprising a fusion of one or more deaminases to the nuclease deficient polypeptide.

[2994] Paragraph 75. The genome editing system of Paragraph 74, wherein the one or more deaminases is selected from adenine deaminase or cytosine deaminase.

[2995] Paragraph 76. The genome editing system of Paragraph 74, wherein the fusion enables base editing on DNA and/or RNA.

[2996] Paragraph 77. The genome editing system of Paragraph 76, wherein system modifies one or more nucleobase on DNA and RNA.

[2997] Paragraph 78. The genome editing system of Paragraph 40, wherein the system enables multiplexed gene editing.

[2998] Paragraph 79. The genome editing system of Paragraph 40, wherein the polynucleotide sequences comprise a single CRISPR RNA (crRNA).

[2999] Paragraph 80. The genome editing system of Paragraph 40, wherein the system enables targeting multiple genes simultaneously.

[3000] Paragraph 81. The genome editing system of Paragraph 40, wherein the polypeptide is operably linked to a nuclear localization signal (NLS).

[3001] Paragraph 82. The genome editing system of Paragraph 81, wherein the polypeptide linked NLS further comprises crRNA to form a ribonucleoprotein complex.

[3002] Paragraph 83. The genome editing system of Paragraph 40 wherein the one or more polypeptide sequences comprises a modification.

[3003] Paragraph 84. The genome editing system of Paragraph 83 wherein the modification comprises a nuclease-deficient polypeptide (dCas).

[3004] Paragraph 85. The genome editing system of Paragraph 40 wherein the guide RNA comprises a prime editing guide RNA (pegRNA).

[3005] Paragraph 86. The genome editing system of Paragraph 85, wherein the pegRNA hybridizes to the targeted polynucleotide sequence and acts as a primer to the one or more reverse transcriptases.

[3006] Paragraph 87. The genome editing system of Paragraph 85, wherein the pegRNA binds a nicked strand for initiation of repair through one or more reverse transcriptases.

[3007] Paragraph 88. The genome editing system of Paragraph 87, wherein the nuclease-deficient polypeptide comprises nickase activity.

[3008] Paragraph 89. The genome editing system of Paragraph 84, comprising a fusion of one or more reverse transcriptases to the nuclease deficient Cas (dCas).

[3009] Paragraph 90. The genome editing system of Paragraph 89, wherein the fusion of one or more reverse transcriptases is selected from Moloney Murine Leukemia Virus (M-MLV).

[3010] Paragraph 91. The genome editing system of Paragraph 84, wherein the polynucleotide sequences comprise a guide RNA or a pegRNA.

[3011] Paragraph 92. The genome editing system of Paragraph 91, wherein the pegRNA comprises or consists of an extended single guide RNA containing a primer binding site (PBS) and a reverse transcriptase (RT) template sequence.

[3012] Paragraph 93. The genome editing system of any one of Paragraphs 40-92, wherein the system comprises improved genome editing characteristics selected from efficiency, specificity, precision, intended edits:unintended edits, indels relative to Cas9.

[3013] Paragraph 94. The genome editing system of Paragraph 40 wherein the system is characterized in exhibiting reduced off-target effects in host cells when compared to the equivalent Cas9 endonuclease in host cells relative to SpCas9.

[3014] Paragraph 95. The genome editing system of Paragraph 40 wherein the targeted polynucleotide sequence is contacted by
[3015] (a) a polypeptide having at least 45%, 46%, 47%, 48%, 49%, 50%, 51%, 52%, 53%, 54%, 55%, 56%, 57%, 58%, 59%, 60%, 61%, 62%, 63%, 64%, or 65% sequence identity to any one of the sequences of (Group 1) SEQ ID NO:1-3; (Group 2) SEQ ID NO:20-21; (Group 3) SEQ ID NO:32-33; (Group 4) SEQ ID NO:45-46; (Group 5) SEQ ID NO:57-59; (Group 6) SEQ ID NO:76-79; (Group 7) SEQ ID NO:100-102; (Group 8) SEQ ID NO:118-119; (Group 9) SEQ ID NO:131-170; (Group 10) SEQ ID NO:331-340; (Group 11) SEQ ID NO:368-370; (Group 12) SEQ ID NO:386-387; (Group 13) SEQ ID NO:399-404; and (Group 14) SEQ ID NO:436-456; and
[3016] (b) a guide RNA, wherein the guide RNA optionally forms a ribonucleoprotein complex with the polypeptide and the guide RNA.

[3017] Paragraph 96. A vector comprising the isolated or recombinant nucleic acid sequence of any one of Paragraphs 1-95.

[3018] Paragraph 97. The vector of Paragraph 96, wherein the vector is selected from viral vectors comprising a retroviral vector, a lentiviral vector, an adenoviral, an adeno-associated viral vector, vaccinia viral vector, poxviral vector, and herpes simplex viral vector.

[3019] Paragraph 98. The vector of Paragraph 96, wherein the vector is selected from a non-viral vectors comprising liposomes, lipid nanoparticles (LNPs), cationic polymers, vesicles, and gold nanoparticles.

[3020] Paragraph 99. A host cell comprising the isolated or recombinant nucleic acid sequence of Paragraph 1 or 37.

[3021] Paragraph 100. The host cell of Paragraph 99, wherein the host cell is selected from one or more prokaryotic cells, mammalian cells, human cells or synthetic cells.

[3022] Paragraph 101. The host cell of Paragraph 99, wherein the host cell produces a site-specific modification of a targeted polynucleotide sequence of a host cell genome.

[3023] Paragraph 102. The host cell of Paragraph 99, wherein the host cell is modified to comprise lower off-target effects relative to SpCas9.

[3024] Paragraph 103. A polypeptide encoded by the isolated or recombinant nucleic acid sequence of any one of preceding Paragraphs.

[3025] Paragraph 104. A fusion protein comprising an isolated polypeptide encoded by an isolated or recombinant nucleic acid sequence of Paragraph 1 fused to a heterologous amino acid sequence.

[3026] Paragraph 105. The fusion protein of Paragraph 104, wherein the fusion protein comprises a nuclease-deficient polypeptide.

[3027] Paragraph 106. A method of modifying a targeted polynucleotide sequence, said method comprising:
[3028] (a) one or more polypeptide sequences comprising at least 45%, 46%, 47%, 48%, 49%, 50%, 51%, 52%, 53%, 54%, 55%, 56%, 57%, 58%, 59%, 60%, 61%, 62%, 63%, 64%, or 65% sequence identity to any one of sequences in (Group 1) SEQ ID NO:1-3; (Group 2) SEQ ID NO:20-21; (Group 3) SEQ ID NO:32-33; (Group 4) SEQ ID NO:45-46; (Group 5) SEQ ID NO:57-59; (Group 6) SEQ ID NO:76-79; (Group 7) SEQ ID NO:100-102; (Group 8) SEQ ID NO:118-119; (Group 9) SEQ ID NO:131-170; (Group 10) SEQ ID NO:331-340; (Group 11) SEQ ID NO:368-370; (Group 12) SEQ ID NO:386-387; (Group 13) SEQ ID NO:399-404; and (Group 14) SEQ ID NO:436-456;
[3029] (b) one or more polynucleotide sequences comprising a guide RNA, wherein the guide RNA comprises a complementary sequence to that of a targeted polynucleotide sequence; and
[3030] (c) introducing into a host cell the one or more polypeptide sequences of (a) and the one or more polynucleotide sequences of (b) in a delivery vector;
[3031] wherein the polypeptide sequence is configured to form a ribonucleoprotein complex with the guide RNA, and wherein the ribonucleoprotein complex modifies targeted polynucleotide sequence.

[3032] Paragraph 107. The method of Paragraph 106, wherein the delivery vector is selected from viral vector is selected from a retroviral vector, a lentiviral vector, an adenoviral, an adeno-associated viral vector, vaccinia viral vector, poxviral vector, and herpes simplex viral vector.

[3033] Paragraph 108. The method of Paragraph 106, wherein the delivery vector comprises a non-viral vectors selected from cationic liposomes, lipid nanoparticles (LNPs), cationic polymers, vesicles, and gold nanoparticles.

[3034] Paragraph 109. A method of modifying a gene of interest comprising: culturing a host cell engineered to modify a targeted polynucleotide sequence, wherein the host cell comprises the isolated or recombinant polypeptide and the polynucleotide sequence of Paragraph 106.

[3035] Paragraph 110. A method for modifying a genome of a host cell comprising:
[3036] contacting the host cell with the isolated or recombinant polypeptide sequence selected from (Group 1) SEQ ID NO:1-3; (Group 2) SEQ ID NO:20-21; (Group 3) SEQ ID NO:32-33; (Group 4) SEQ ID NO:45-46; (Group 5) SEQ ID NO:57-59; (Group 6) SEQ ID NO:76-79; (Group 7) SEQ ID NO:100-102; (Group 8) SEQ ID NO:118-119; (Group 9) SEQ ID NO:131-170; (Group 10) SEQ ID NO:331-340; (Group 11) SEQ ID NO:368-370; (Group 12) SEQ ID NO:386-387; (Group 13) SEQ ID NO:399-404; and (Group 14) SEQ ID NO:436-456 and one or more guide RNA of Paragraph 37.

[3037] Paragraph 111. The method of Paragraph 110, wherein the genome editing system comprises enhanced transduction efficiency and/or low cytotoxicity.

[3038] Paragraph 112. The method of Paragraph 110, wherein the method comprises a high-throughput editing of the target region of the host cell genome.

[3039] Paragraph 113. The method of Paragraph 110, wherein the polypeptide displays about 50-fold higher affinity to crRNA in the presence of one or more divalent cations selected from Mg²⁺, Mn²⁺ or Ca²⁺.

[3040] Paragraph 114. A pharmaceutical composition comprising:
[3041] a) a lipid nanoparticle (LNP); and
[3042] b) a biopolymer construct of any of the preceding Paragraphs.

[3043] Paragraph 115. The pharmaceutical composition of Paragraph 114, wherein the LNP encapsulates one or more elements of a biopolymer construct.

[3044] Paragraph 116. The pharmaceutical composition of any one of Paragraphs 114-115, wherein the lipid nanoparticle comprises:
[3045] a) one or more ionizable lipids;
[3046] b) one or more structural lipids;
[3047] c) one or more PEGylated lipids; and
[3048] d) one or more phospholipids.

[3049] Paragraph 117. The pharmaceutical composition of Paragraph 116, wherein the one or more ionizable lipids is selected from the group consisting of those disclosed in Table X.

[3050] Paragraph 118. The pharmaceutical composition of any one of Paragraphs 116-117, wherein the one or more structural lipids are selected from the group consisting of cholesterol, fecosterol, beta sitosterol, sitosterol, ergosterol, campesterol, stigmasterol, brassicasterol, tomatidine, tomatine, ursolic acid, alpha-tocopherol, prednisolone, dexamethasone, prednisone, and hydrocortisone.

[3051] Paragraph 119. The pharmaceutical composition of any one of Paragraphs 116-118, wherein the one or more PEGylated lipids are selected from the group consisting of PEG-c-DOMG, PEG-DMG, PEG-DLPE, PEG-DMPE, PEG-DPPC, and PEG-DSPE.

[3052] Paragraph 120. The pharmaceutical composition of any one of Paragraphs 116-119, wherein the one or more phospholipids are selected from the group consisting of 1,2-distearoyl-sn-glycero-3-phosphocholine (DSPC), 1,2-dioleoyl-sn-glycero-3-phosphoethanolamine (DOPE), 1,2-dilinoleoyl-sn-glycero-3-phosphocholine (DLPC), 1,2-dimyristoyl-sn-glycero-phosphocholine (DMPC), 1,2-dioleoyl-sn-glycero-3-phosphocholine (DOPC), 1,2-dipalmitoyl-sn-glycero-3-phosphocholine (DPPC), 1,2-diundecanoyl-sn-glycero-phosphocholine (DUPC), 1-palmitoyl-2-oleoyl-sn-glycero-3-phosphocho line (POPC), 1,2-di-O-octadecenyl-sn-glycero-3-phosphocholine (18:0 Diether PC), 1-oleoyl-2-cholesterylhemisuc cinoyl-sn-glycero-3-phosphocholine (OChemsPC), 1-hexadecyl-sn-glycero-3-phosphocholine (C16 Lyso PC), 1,2-dilinolenoyl-sn-glycero-3-phosphocholine, 1,2-diarachidonoyl-sn-glycero-3-phosphocholine, 1,2-didocosahexaenoyl-sn-glycero-3-phosphocholine, 1,2-diphytanoylsn-glycero-3-phosphoethanolamine (ME 16.0 PE), 1,2-distearoyl-sn-glycero-3-phosphoethanolamine, 1,2-dilinoleoyl-sn-glycero-3-phosphoethanolamine, 1,2-dilinolenoyl-sn-glycero-3-phosphoethanolamine, 1,2-diarachidonoyl-sn-glycero-3-phosphoethanolamine, 1,2-didocosahexaenoyl-sn-glycero-3-phosphoethanolamine, 1,2-dioleoyl-sn-glycero-3-phospho-rac-(1-glycerol) sodium salt (DOPG), and sphingomyelin.

[3053] Paragraph 121. The pharmaceutical composition of any one of Paragraphs 116-120, wherein the lipid nanoparticle comprises about 48.5 mol % ionizable lipid, about 10 mol % phospholipid, about 40 mol % structural lipid, and about 1.5 mol % of PEG lipid.

[3054] Paragraph 122. The pharmaceutical composition of any one of Paragraphs 116-121, wherein the lipid nanoparticle comprises about 48.5 mol % ionizable lipid, about 10 mol % phospholipid, about 39 mol % structural lipid, and about 2.5 mol % of PEG lipid.

[3055] Paragraph 123. The pharmaceutical composition of any one of Paragraphs 116-122 wherein the LNP further comprises a targeting moiety operably connected to the LNP.

[3056] Paragraph 124. The pharmaceutical composition of any one of Paragraphs 116-123, wherein the LNP further comprises one or more additional components selected from the group consisting of DDAB, EPC, 14PA, 18BMP, DODAP, DOTAP, and C12-200.

[3057] Paragraph 201. An isolated or recombinant polynucleotide comprising a nucleic acid sequence selected from the group consisting of:
[3058] (a) a nucleic acid sequence that encodes a polypeptide having the amino acid sequence of SEQ ID NO: 334 (No. ID405), SEQ ID NO: 58 (No. ID414), or SEQ ID NO: 564 (No. ID418), SEQ ID NO: 335 (No. ID406), SEQ ID NO: 331 (No. ID411), SEQ ID NO: 20 (No. ID415), or SEQ ID NO: 445 (No. ID419);
[3059] (b) a nucleic acid sequence that encodes a polypeptide at least 50%, at least 55%, at least 60%, at least 65%, at least 70%, at least 75%, at least 80%, at least 85%, at least 90%, at least 91%, at least 92%, at least 93%, at least 94%, at least 95%, at least 96%, at least 97%, at least 98%, at least 99%%, at least 99.1%, at least 99.2%, at least 99.3%, at least 99.4%, at least 99.5%, at least 99.6%, at least 99.7%, at least 99.8% or at least 99.9% identical to SEQ ID NO: 334 (No. ID405), SEQ ID NO: 58 (No. ID414), or SEQ ID NO: 564 (No. ID418), SEQ ID NO: 335 (No. ID406), SEQ ID NO: 331 (No. ID411), SEQ ID NO: 20 (No. ID415), or SEQ ID NO: 445 (No. ID419); and
[3060] (c) a nucleic acid sequence at least 50%, at least 55%, at least 60%, at least 65%, at least 70%, at least 75%, at least 80%, at least 85%, at least 90%, at least 91%, at least 92%, at least 93%, at least 94%, at least 95%, at least 96%, at least 97%, at least 98%, at least 99%%, at least 99.1%, at least 99.2%, at least 99.3%, at least 99.4%, at least 99.5%, at least 99.6%, at least 99.7%, at least 99.8% or at least 99.9% identical to a sequence selected from SEQ ID NO: 365 (No. ID405), SEQ ID NO: 74 (No. ID414), or SEQ ID NO: 565 (No. ID418), SEQ ID NO: 366 (No. ID406), SEQ ID NO: 331 (No. ID411), SEQ ID NO: 30 (No. ID415), or SEQ ID NO: 445 (No. ID419).

[3061] Paragraph 202. The isolated or recombinant nucleic acid sequence of paragraph 201, wherein the nucleic acid sequence encodes a polypeptide having at least one activity selected from endonuclease activity; endoribonuclease activity, or RNA-guided DNase activity.

[3062] Paragraph 203. The isolated or recombinant nucleic acid sequence of paragraph 201, wherein the nucleic acid sequence comprises
[3063] a. one or more α-helical recognition lobe (REC) and a nuclease lobe (NUC);
[3064] b. a Wedge (WED), α-helical recognition lobe (REC), PAM-interacting (PI), RuvC nuclease, Bridge Helix (BH) and NUC domains; or
[3065] c. one or more domains selected from RuvC, REC, WED, BH, PI and NUC domains.

[3066] Paragraph 204. The isolated or recombinant nucleic acid sequence of paragraph 201, wherein the nucleic acid sequence encodes a polypeptide that recognizes or binds to a targeted polynucleotide sequence.

[3067] Paragraph 205. The isolated or recombinant nucleic acid sequence of paragraph 201, wherein the nucleic acid sequence encodes a polypeptide that cleaves a targeted polynucleotide sequence.

[3068] Paragraph 206. The isolated or recombinant nucleic acid sequence of paragraph 201, wherein the nucleic acid sequence encodes a polypeptide that recognizes or binds crRNAs.

[3069] Paragraph 207. The isolated or recombinant nucleic acid sequence of paragraph 206, wherein the crRNA is any crRNA sequence from Table S15C.

[3070] Paragraph 208. The isolated or recombinant nucleic acid sequence of paragraph 201, wherein the nucleic acid sequence encodes a polypeptide that modifies one or more genomes.

[3071] Paragraph 209. The isolated or recombinant nucleic acid sequence of paragraph 208, wherein the modification comprises genome editing.

[3072] Paragraph 200. The isolated or recombinant nucleic acid sequence of paragraph 201, wherein the polypeptide comprises one or more mutations.

[3073] Paragraph 211. The isolated or recombinant nucleic acid sequence of paragraph 210, wherein the mutation is selected from one or more RuvC, REC, WED, BH, PI and NUC domains.

[3074] Paragraph 212. The isolated or recombinant nucleic acid sequence of paragraph 201, 210 or 211, wherein the nucleic acid sequence encodes a polypeptide comprising a nickase activity.

[3075] Paragraph 213. The isolated or recombinant nucleic acid sequence of paragraph 201, 210 or 211, wherein the nucleic acid sequence encodes a nuclease-deficient polypeptide.

[3076] Paragraph 214. The isolated or recombinant nucleic acid sequence of paragraph 212 or 213, wherein the nucleic acid sequence is operably fused to a nucleic acid encoding one or more deaminases.

[3077] Paragraph 215. The isolated or recombinant nucleic acid sequence of paragraph 214, wherein the one or more deaminases is selected from adenine deaminase or cytosine deaminase.

[3078] Paragraph 216. The isolated or recombinant nucleic acid sequence of paragraph 215, wherein the deaminases modify a targeted polynucleotide sequence.

[3079] Paragraph 217. The isolated or recombinant nucleic acid sequence of paragraph 216, wherein the modification comprises base editing.

[3080] Paragraph 218. The isolated or recombinant nucleic acid sequence of paragraph 212 or 213, wherein
[3081] a. the nucleic acid sequence encoding the polypeptide comprising a nickase activity; or
[3082] b. the nucleic acid sequence encoding a nuclease-deficient polypeptide, is operably fused to a nucleic acid sequence encoding one or more reverse transcriptases.

[3083] Paragraph 219. The isolated or recombinant nucleic acid sequence of paragraph 212 or 213, wherein
[3084] a. the nucleic acid sequence encoding the polypeptide comprising a nickase activity; or
[3085] b. the nucleic acid sequence encoding a nuclease-deficient polypeptide, is not operably fused to a nucleic acid sequence encoding one or more reverse transcriptases.

[3086] Paragraph 220. The isolated or recombinant nucleic acid sequence of paragraph 218 or 219, further comprising a prime editing guide RNA (pegRNA).

[3087] Paragraph 221. The isolated or recombinant nucleic acid sequence of paragraph 220, wherein the pegRNA hybridizes to a targeted polynucleotide sequence and acts as a primer to the one or more reverse transcriptases.

[3088] Paragraph 222. The isolated or recombinant nucleic acid sequence of paragraph 220, wherein the pegRNA binds to a nicked strand for initiation of repair through one or more reverse transcriptases.

[3089] Paragraph 223. The isolated or recombinant nucleic acid sequence of paragraph 201, further comprising a donor polynucleotide.

[3090] Paragraph 224. The isolated or recombinant nucleic acid sequence of paragraph 201, wherein the nucleic acid sequence is operably linked to a nucleic acid sequence encoding one or more nuclear localization signals.

[3091] Paragraph 225. The isolated or recombinant nucleic acid sequence of paragraph 201, wherein the nucleic acid sequence is operably linked to one or more expression control sequences.

[3092] Paragraph 226. The isolated or recombinant nucleic acid sequence of paragraph 201, wherein the expression control sequences comprise one or more transcriptional activators or repressors.

[3093] Paragraph 227. The isolated or recombinant nucleic acid sequence of any one of the above paragraphs wherein the polypeptide comprises improved genome editing characteristics selected from efficiency, specificity, precision, intended edits:unintended edits, indels relative to Cas9.

[3094] Paragraph 228. A vector comprising the isolated or recombinant nucleic acid sequence of any one of paragraphs 201-227.

[3095] Paragraph 229. The vector of paragraph 228, wherein the vector is selected from viral vectors comprising a retroviral vector, a lentiviral vector, an adenoviral, an adeno-associated viral vector, vaccinia viral vector, poxviral vector, and herpes simplex viral vector.

[3096] Paragraph 230. The vector of paragraph 228, wherein the vector is selected from a non-viral vectors comprising liposomes, lipid nanoparticles (LNPs), cationic polymers, vesicles, and gold nanoparticles.

[3097] Paragraph 231. A host cell comprising the isolated or recombinant nucleic acid sequence of paragraph 228.

[3098] Paragraph 232. The host cell of paragraph 231, wherein the host cell is selected from one or more prokaryotic cells, mammalian cells, human cells or synthetic cells.

[3099] Paragraph 233. The host cell of paragraph 231, wherein the host cell produces a site-specific modification of a targeted nucleic acid sequence of a host cell genome.

[3100] Paragraph 234. A polypeptide encoded by the isolated or recombinant nucleic acid sequence of any one of claims 1-34.

[3101] Paragraph 235. A fusion protein comprising an isolated polypeptide encoded by an isolated or recombinant nucleic acid sequence of paragraph 201 fused to a heterologous amino acid sequence.

[3102] Paragraph 236. The fusion protein of paragraph 235 wherein the fusion protein comprises a nuclease-deficient polypeptide.

[3103] Paragraph 237. An isolated or recombinant guide RNA comprising or consisting of a nucleic acid sequence from Table S15C.

[3104] Paragraph 238. A guide RNA comprising the crRNA of paragraph 237.

[3105] Paragraph 239. The guide RNA of paragraph 238 wherein the crRNA hybridizes to the targeted polynucleotide sequence.

[3106] Paragraph 240. A genome editing system comprising:
[3107] a. one or more polypeptide sequences comprising at least 45%, 46%, 47%, 48%, 49%, 50%, 51%, 52%, 53%, 54%, 55%, 56%, 57%, 58%, 59%, 60%, 61%, 62%, 63%, 64%, or 65% sequence identity to any one of sequences selected from SEQ ID NO: 334 (No. ID405), SEQ ID NO: 58 (No. ID414), or SEQ ID NO: 564 (No. ID418), SEQ ID NO: 335 (No. ID406), SEQ ID NO: 331 (No. ID411), SEQ ID NO: 20 (No. ID415), or SEQ ID NO: 445 (No. ID419); and
[3108] b. one or more polynucleotide sequences comprising a guide RNA, wherein the guide RNA comprises a complementary sequence to that of a targeted polynucleotide sequence.

[3109] Paragraph 241. The genome editing system of paragraph 240, wherein the one or more polypeptide sequences comprise nuclease activity, endonuclease activity, endoribonuclease activity and/or RNA-guided DNase activity.

[3110] Paragraph 242. The genome editing system of paragraph 240, wherein the guide RNA hybridizes to the targeted polynucleotide sequence.

[3111] Paragraph 243. The genome editing system of paragraph 240, wherein the guide RNA comprises 12-40 nucleotides.

[3112] Paragraph 244. The genome editing system of paragraph 240, wherein the targeted polynucleotide sequence comprises one or more protospacer adjacent motif (PAM) recognition domains selected from 5′-TTTN-3′, 5′-TTN-3′, 5′-TNN-3′, 5′-TTV-3′, or 5′-TTTV-3′, wherein N=A, T, C or G and V=A, C or G.

[3113] Paragraph 245. The genome editing system of paragraph 240, wherein the targeted polynucleotide sequence comprises one or more relaxed PAM recognition domains.

[3114] Paragraph 246. The genome editing system of paragraph 240, wherein the one or more polypeptide sequences and the one or more polynucleotide sequences comprising a guide RNA form a ribonucleoprotein complex.

[3115] Paragraph 247. The genome editing system of paragraph 240, wherein the one or more polypeptide sequences comprise
[3116] a. one or more α-helical recognition lobe (REC) and a nuclease lobe (NUC);
[3117] b. a Wedge (WED), α-helical recognition lobe (REC), PAM-interacting (PI), RuvC nuclease, Bridge Helix (BH) and NUC domains; or
[3118] c. one or more domains selected from RuvC, REC, WED, BH, PI and NUC domains.

[3119] Paragraph 248. The genome editing system of paragraph 247, wherein the REC lobe comprises REC1 and REC2 domains.

[3120] Paragraph 249. The genome editing system of paragraph 247, wherein the NUC lobe comprises the RuvC, PI, WED, and Bridge Helix (BH) domains.

[3121] Paragraph 250. The genome editing system of paragraph 247, wherein the one or more polypeptide sequences lack a HNH endonuclease domain.

[3122] Paragraph 251. The genome editing system of paragraph 240, wherein the system is characterized as a Class 2, Type V Cas endonuclease.

[3123] Paragraph 252. The genome editing system of paragraph 207 wherein the crRNA hybridizes to the targeted polynucleotide sequence.

[3124] Paragraph 253. The genome editing system of paragraph 240, wherein the guide RNA comprises one or more chemical modifications selected from 2′-O-Me, 2′-F, and 2′F-ANA at 2′OH; 2′F-4′-Cα-OMe and 2′,4′-di-Cα-OMe at 2′ and 4′ carbons; phosphodiester modifications comprising sulfide-based Phosphorothioate (PS) or acetate-based phosphonoacetate alterations; combinations of the ribose and phosphodiester modifications; locked nucleic acid (LNA), bridged nucleic acids (BNA), S-constrained ethyl (cEt), and unlocked nucleic acid (UNA); modifications to produce a phosphodiester bond between the 2′ and 5′ carbons (2′,5′-RNA) of adjacent RNAs; and a butane 4-carbon chain link between adjacent RNAs.

[3125] Paragraph 254. The genome editing system of any one of claims 40-53 comprising one or more viral vectors selected from a retroviral vector, a lentiviral vector, an adenoviral, an adeno-associated viral vector, vaccinia viral vector, poxviral vector, and herpes simplex viral vector.

[3126] Paragraph 255. The genome editing system of any one of claims 40-53 comprising one or more non-viral vectors selected from liposomes, lipid nanoparticles (LNPs), cationic polymers, vesicles, and gold nanoparticles.

[3127] Paragraph 256. The genome editing system of any one of claims 40-55, wherein the guide RNA modifies the targeted polynucleotide sequence of a host cell genome.

[3128] Paragraph 257. The genome editing system of paragraph 256, wherein the targeted polynucleotide sequence is modified by an insertion, deletion or alteration of one or more base pairs at the targeted polynucleotide sequence in the host cell genome.

[3129] Paragraph 258. The genome editing system of paragraph 240, wherein the system further comprises one or more donor nucleic acid sequences wherein the donor nucleic acid sequence comprises: one or more desired modification sequence flanked by two sequences homologous to one or more targeted polynucleotide sequence of a host cell genome, wherein the system recognizes and/or cleaves the targeted polynucleotide sequence of the host cell genome.

[3130] Paragraph 259. The genome editing system of paragraph 258, wherein the donor nucleic acid sequence repairs the targeted polynucleotide sequence of the host cell genome cleaved by polypeptide.

[3131] Paragraph 260. The genome editing system of any one of paragraphs 240-259, wherein the one or more polypeptide sequences comprise about 900, about 1000, about 1100, about 1200, about 1300, about 1400 or about 1500 amino acid residues.

[3132] Paragraph 261. The genome editing system of any one of paragraphs 240-260, wherein the system is characterized in enhanced efficiency and precision of site-directed integration.

[3133] Paragraph 262. The genome editing system of paragraph 261, wherein the efficiency and precision of site-directed integration is enhanced by staggered overhangs on the donor nucleic acid sequence.

[3134] Paragraph 263. The genome editing system of paragraph 240, wherein the polypeptide sequences comprise at least one activity selected from endonuclease activity; endoribonuclease activity, or RNA-guided DNase activity.

[3135] Paragraph 264. The genome editing system of paragraph 240, wherein the system is characterized in exhibiting reduced off-target effects relative to Cas9.

[3136] Paragraph 265. The genome editing system of paragraph 240, wherein the targeted polynucleotide sequence and/or a non-target DNA strand is cleaved is cleaved by the RuvC domain of the polypeptide.

[3137] Paragraph 266. The genome editing system of paragraph 240, wherein the system comprises multiple copies of guide RNA expressed in a host cell.

[3138] Paragraph 267. The genome editing system of paragraph 240, wherein the polypeptide comprises one or more mutations.

[3139] Paragraph 268. The genome editing system of paragraph 267, wherein the mutation is selected from one or more domains selected from RuvC, REC, WED, BH, PI and NUC domains.

[3140] Paragraph 269. The genome editing system of paragraph 267, wherein the mutation in the nucleic acid sequence encodes a nuclease-deficient polypeptide.

[3141] Paragraph 270. The genome editing system of paragraph 267, comprising a fusion of one or more deaminases to the nuclease deficient polypeptide.

[3142] Paragraph 271. The genome editing system of paragraph 267, wherein the one or more deaminases is selected from adenine deaminase or cytosine deaminase.

[3143] Paragraph 272. The genome editing system of paragraph 267, wherein the fusion enables base editing on DNA and/or RNA.

[3144] Paragraph 273. The genome editing system of paragraph 272, wherein system modifies one or more nucleobase on DNA and RNA.

[3145] Paragraph 274. The genome editing system of paragraph 240, wherein the system enables multiplexed gene editing.

[3146] Paragraph 275. The genome editing system of paragraph 240, wherein the polynucleotide sequences comprise a single CRISPR RNA (crRNA).

[3147] Paragraph 276. The genome editing system of paragraph 240, wherein the system enables targeting multiple genes simultaneously.

[3148] Paragraph 277. The genome editing system of paragraph 240, wherein the polypeptide is operably linked to a nuclear localization signal (NLS).

[3149] Paragraph 278. The genome editing system of paragraph 277, wherein the polypeptide linked NLS further comprises crRNA to form a ribonucleoprotein complex.

[3150] Paragraph 279. The genome editing system of paragraph 240 wherein the one or more polypeptide sequences comprises a modification.

[3151] Paragraph 280. The genome editing system of paragraph 279 wherein the modification comprises a nuclease-deficient polypeptide (dCas).

[3152] Paragraph 281. The genome editing system of paragraph 240 wherein the guide RNA comprises a prime editing guide RNA (pegRNA).

[3153] Paragraph 282. The genome editing system of paragraph 281, wherein the pegRNA hybridizes to the targeted polynucleotide sequence and acts as a primer to the one or more reverse transcriptases.

[3154] Paragraph 283. The genome editing system of paragraph 282, wherein the pegRNA binds a nicked strand for initiation of repair through one or more reverse transcriptases.

[3155] Paragraph 284. The genome editing system of paragraph 283, wherein the nuclease-deficient polypeptide comprises nickase activity.

[3156] Paragraph 285. The genome editing system of paragraph 280, comprising a fusion of one or more reverse transcriptases to the nuclease deficient Cas (dCas).

[3157] Paragraph 286. The genome editing system of paragraph 285, wherein the fusion of one or more reverse transcriptases is selected from Moloney Murine Leukemia Virus (M-MLV).

[3158] Paragraph 287. The genome editing system of paragraph 281, wherein the polynucleotide sequences comprise a guide RNA or a pegRNA.

[3159] Paragraph 288. The genome editing system of paragraph 287, wherein the pegRNA comprises or consists of an extended single guide RNA containing a primer binding site (PBS) and a reverse transcriptase (RT) template sequence.

[3160] Paragraph 289. The genome editing system of any one of claims 40-88, wherein the system comprises improved genome editing characteristics selected from efficiency, specificity, precision, intended edits:unintended edits, indels relative to Cas9.

[3161] Paragraph 290. The genome editing system of paragraph 240 wherein the system is characterized in exhibiting reduced off-target effects in host cells when compared to the equivalent Cas9 endonuclease in host cells relative to SpCas9.

[3162] Paragraph 291. The genome editing system of paragraph 240 wherein the targeted polynucleotide sequence is contacted by
[3163] (a) a polypeptide having at least 45%, 46%, 47%, 48%, 49%, 50%, 51%, 52%, 53%, 54%, 55%, 56%, 57%, 58%, 59%, 60%, 61%, 62%, 63%, 64%, or 65% sequence identity to any one of the sequences in SEQ ID NOs: 1-3 or SEQ ID NO: 16; and
[3164] (b) a guide RNA, wherein the guide RNA optionally forms a ribonucleoprotein complex with the polypeptide and the guide RNA.

[3165] Paragraph 292. A vector comprising the isolated or recombinant nucleic acid sequence of any one of paragraphs 201-291.

[3166] Paragraph 293. The vector of paragraph 292, wherein the vector is selected from viral vectors comprising a retroviral vector, a lentiviral vector, an adenoviral, an adeno-associated viral vector, vaccinia viral vector, poxviral vector, and herpes simplex viral vector.

[3167] Paragraph 294. The vector of paragraph 292, wherein the vector is selected from a non-viral vectors comprising liposomes, lipid nanoparticles (LNPs), cationic polymers, vesicles, and gold nanoparticles.

[3168] Paragraph 295. A host cell comprising the isolated or recombinant nucleic acid sequence of paragraph 201 or 237.

[3169] Paragraph 296. The host cell of paragraph 295, wherein the host cell is selected from one or more prokaryotic cells, mammalian cells, human cells or synthetic cells.

[3170] Paragraph 297. The host cell of paragraph 295, wherein the host cell produces a site-specific modification of a targeted polynucleotide sequence of a host cell genome.

[3171] Paragraph 298. The host cell of paragraph 295, wherein the host cell is modified to comprise lower off-target effects relative to SpCas9.

[3172] Paragraph 299. A polypeptide encoded by the isolated or recombinant nucleic acid sequence of any one of preceding claims.

[3173] Paragraph 300. A fusion protein comprising an isolated polypeptide encoded by an isolated or recombinant nucleic acid sequence of paragraph 201 fused to a heterologous amino acid sequence.

[3174] Paragraph 301. The fusion protein of paragraph 300, wherein the fusion protein comprises a nuclease-deficient polypeptide.

[3175] Paragraph 302. A method of modifying a targeted polynucleotide sequence, said method comprising
[3176] a. one or more polypeptide sequences comprising at least 45%, 46%, 47%, 48%, 49%, 50%, 51%, 52%, 53%, 54%, 55%, 56%, 57%, 58%, 59%, 60%, 61%, 62%, 63%, 64%, or 65% sequence identity to any one of sequences in SEQ ID NOs: 1-3 or SEQ ID NO: 16;
[3177] b. one or more polynucleotide sequences comprising a guide RNA, wherein the guide RNA comprises a complementary sequence to that of a targeted polynucleotide sequence; and
[3178] c. introducing into a host cell the one or more polypeptide sequences of (a) and the one or more polynucleotide sequences of (b) in a delivery vector;
[3179] wherein the polypeptide sequence is configured to form a ribonucleoprotein complex with the guide RNA, and wherein the ribonucleoprotein complex modifies targeted polynucleotide sequence.

[3180] Paragraph 303. The method of paragraph 302, wherein the delivery vector is selected from viral vector is selected from a retroviral vector, a lentiviral vector, an adenoviral, an adeno-associated viral vector, vaccinia viral vector, poxviral vector, and herpes simplex viral vector.

[3181] Paragraph 304. The method of paragraph 302, wherein the delivery vector comprises a non-viral vectors selected from cationic liposomes, lipid nanoparticles (LNPs), cationic polymers, vesicles, and gold nanoparticles.

[3182] Paragraph 305. A method of modifying a gene of interest comprising: culturing a host cell engineered to modify a targeted polynucleotide sequence, wherein the host cell comprises the isolated or recombinant polypeptide and the polynucleotide sequence of paragraph 306.

[3183] Paragraph 306. A method for modifying a genome of a host cell comprising:
[3184] contacting the host cell with the isolated or recombinant polypeptide sequence selected from SEQ ID NO: 334 (No. ID405), SEQ ID NO: 58 (No. ID414), or SEQ ID NO: 564 (No. ID418), SEQ ID NO: 335 (No. ID406), SEQ ID NO: 331 (No. ID411), SEQ ID NO: 20 (No. ID415), and SEQ ID NO: 445 (No. ID419).

[3185] Paragraph 307. The method of paragraph 306, wherein the genome editing system comprises enhanced transduction efficiency and/or low cytotoxicity.

[3186] Paragraph 308. The method of paragraph 306, wherein the method comprises a high-throughput editing of the target region of the host cell genome.

[3187] Paragraph 309. The method of paragraph 306, wherein the polypeptide displays about 50-fold higher affinity to crRNA in the presence of one or more divalent cations selected from Mg²⁺, Mn²⁺ or Ca²⁺.

[3188] Paragraph 310. A pharmaceutical composition comprising:
[3189] a) a lipid nanoparticle (LNP); and
[3190] b) a biopolymer construct of any of the preceding claims.

[3191] Paragraph 311. The pharmaceutical composition of paragraph 310, wherein the LNP encapsulates one or more elements of a biopolymer construct.

[3192] Paragraph 312. The pharmaceutical composition of any one of paragraphs 310-311, wherein the lipid nanoparticle comprises:
[3193] a) one or more ionizable lipids;
[3194] b) one or more structural lipids;
[3195] c) one or more PEGylated lipids; and
[3196] d) one or more phospholipids.

[3197] Paragraph 313. The pharmaceutical composition of paragraph 312, wherein the one or more ionizable lipids is selected from the group consisting of those disclosed in Table X.

[3198] Paragraph 314. The pharmaceutical composition of any one of paragraphs 312-313, wherein the one or more structural lipids are selected from the group consisting of cholesterol, fecosterol, beta sitosterol, sitosterol, ergosterol, campesterol, stigmasterol, brassicasterol, tomatidine, tomatine, ursolic acid, alpha-tocopherol, prednisolone, dexamethasone, prednisone, and hydrocortisone.

[3199] Paragraph 315. The pharmaceutical composition of any one of paragraphs 312-314, wherein the one or more PEGylated lipids are selected from the group consisting of PEG-c-DOMG, PEG-DMG, PEG-DLPE, PEG-DMPE, PEG-DPPC, and PEG-DSPE.

[3200] Paragraph 316. The pharmaceutical composition of any one of paragraphs 312-315, wherein the one or more phospholipids are selected from the group consisting of 1,2-distearoyl-sn-glycero-3-phosphocholine (DSPC), 1,2-dioleoyl-sn-glycero-3-phosphoethanolamine (DOPE), 1,2-dilinoleoyl-sn-glycero-3-phosphocholine (DLPC), 1,2-dimyristoyl-sn-glycero-phosphocholine (DMPC), 1,2-dioleoyl-sn-glycero-3-phosphocholine (DOPC), 1,2-dipalmitoyl-sn-glycero-3-phosphocholine (DPPC), 1,2-diundecanoyl-sn-glycero-phosphocholine (DUPC), 1-palmitoyl-2-oleoyl-sn-glycero-3-phosphocho line (POPC), 1,2-di-O-octadecenyl-sn-glycero-3-phosphocholine (18:0 Diether PC), 1-oleoyl-2-cholesterylhemisuc cinoyl-sn-glycero-3-phosphocholine (OChemsPC), 1-hexadecyl-sn-glycero-3-phosphocholine (C16 Lyso PC), 1,2-dilinolenoyl-sn-glycero-3-phosphocholine, 1,2-diarachidonoyl-sn-glycero-3-phosphocholine, 1,2-didocosahexaenoyl-sn-glycero-3-phosphocholine, 1,2-diphytanoylsn-glycero-3-phosphoethanolamine (ME 16.0 PE), 1,2-distearoyl-sn-glycero-3-phosphoethanolamine, 1,2-dilinoleoyl-sn-glycero-3-phosphoethanolamine, 1,2-dilinolenoyl-sn-glycero-3-phosphoethanolamine, 1,2-diarachidonoyl-sn-glycero-3-phosphoethanolamine, 1,2-didocosahexaenoyl-sn-glycero-3-phosphoethanolamine, 1,2-dioleoyl-sn-glycero-3-phospho-rac-(1-glycerol) sodium salt (DOPG), and sphingomyelin.

[3201] Paragraph 317. The pharmaceutical composition of any one of paragraphs 312-316, wherein the lipid nanoparticle comprises about 48.5 mol % ionizable lipid, about 10 mol % phospholipid, about 40 mol % structural lipid, and about 1.5 mol % of PEG lipid.

[3202] Paragraph 318. The pharmaceutical composition of any one of paragraphs 312-317, wherein the lipid nanoparticle comprises about 48.5 mol % ionizable lipid, about 10 mol % phospholipid, about 39 mol % structural lipid, and about 2.5 mol % of PEG lipid.

[3203] Paragraph 319. The pharmaceutical composition of any one of paragraphs 312-318 wherein the LNP further comprises a targeting moiety operably connected to the LNP.

[3204] Paragraph 320. The pharmaceutical composition of any one of paragraphs 312-319, wherein the LNP further comprises one or more additional components selected from the group consisting of DDAB, EPC, 14PA, 18BMP, DODAP,

### INCORPORATION BY REFERENCE

[3205] All publications, patents, and patent applications mentioned in this specification are herein incorporated by reference to the same extent as if each individual publication, patent, or patent application was specifically and individually indicated to be incorporated by reference. However, the citation of a reference herein should not be construed as an acknowledgement that such reference is prior art to the present disclosure. To the extent that any of the definitions or terms provided in the references incorporated by reference differ from the terms and discussion provided herein, the present terms and definitions control.

### EXAMPLES

[3206] The following are examples of methods and compositions of the present disclosure. It is understood that various other embodiments may be practiced, given the general description provided herein.

### Example 1: Production of Nanoparticle Compositions

[3207] A nanoparticle composition may be produced as described in US patent application US20170210697A1, which is incorporated herein by reference in its entirety.

[3208] In order to investigate safe and efficacious nanoparticle compositions for use in the delivery of various payloads, including but not limited to mRNA and siRNA therapeutics, a range of formulations are prepared and tested. Specifically, the particular elements and ratios thereof in the lipid component of nanoparticle compositions are optimized.

[3209] Nanoparticles can be made with mixing processes such as microfluidics and T-junction mixing of two fluid streams, one of which contains the genome editing system and the other has the lipid components.

[3210] Lipid compositions are prepared by combining an ionizable lipid, a phospholipid (such as DOPE or DSPC, obtainable from Avanti Polar Lipids, Alabaster, Ala.), a PEG lipid (such as PEG-DMG, obtainable from Avanti Polar Lipids, Alabaster, Ala.), and a structural lipid (such as cholesterol, obtainable from Sigma-Aldrich, Taufkirchen, Germany, or a cholesterol analog) in ethanol. Lipids are combined to yield desired molar ratios and diluted with water and ethanol.

[3211] Nanoparticle compositions may be prepared by combining a lipid solution with a solution including the genome editing system. The lipid solution is rapidly injected using, for example, a NanoAssemblr® microfluidic based system, into the genome editing system solution.

[3212] Solutions of the genome editing system in deionized water may be diluted in citrate buffer to form a stock solution.

[3213] Nanoparticle compositions can be processed by dialysis to remove ethanol and achieve buffer exchange. Formulations are dialyzed against a buffer such as phosphate buffered saline (PBS), Tris-HCl, or sodium citrate, using, for example, Slide-A-Lyzer cassettes (Thermo Fisher Scientific Inc., Rockford, Ill.). The resulting nanoparticle suspension is filtered through sterile filters (Sarstedt, Nümbrecht, Germany) into glass vials and sealed with crimp closures. Alternatively, a Tangential Flow Filtration (TFF) system, such as a Spectrum KrosFlo system, may be used.

[3214] The method described above induces nano-precipitation and particle formation. Alternative processes including, but not limited to, T-junction and direct injection, may be used to achieve the same nano-precipitation.

### Example 1a: Exemplary Nanoparticle Formulation Procedure

[3215] Ionizable lipids, phospholipids, structural lipids (eg. Cholesterol or other sterols), and PEG lipids are dissolved in ethanol. The ionizable lipids mol % can be from 30-70%, phospholipids mol % can be 5-20%, sterols mol % can be 20-60%, and PEG lipid mol % can be 0.1-10%. The lipid solution is mixed with an acidic buffer containing genome editing system on a mixing device, such as a NanoAssemblr® microfluidic systems, to form LNPs. To adjust LNP particle size, the volume ratio of lipid solution to genome editing system solution can be varied from 1:1 to 20:1, genome editing system concentration in aqueous buffer can be 0.01 mg/mL to 10 mg/mL, N/P ratio can be 1 to 50 and different identities of PEG lipids or other polymers can be used. After the LNP is formed from the mixing device, aqueous buffer is added to reduce the ethanol concentration. The volume of aqueous buffer can be 0.1 to 100 volume of LNP volume coming out of the mixing device. The LNPs are further dialyzed against aqueous and concentrated to a desired concentration. The particle size of LNPs is measured by dynamic light scattering (DLS), for example, by using a Zetasizer Ultra (Malvern Panalytical). Payload encapsulation efficiency is determined, for example, by Quant-it™ RiboGreen assay.

### Example 2: Characterization of Nanoparticle Compositions

[3216] A nanoparticle composition may be characterized as described in US patent application US20170210697A1, which is incorporated herein by reference in its entirety.

[3217] Particle size, polydispersity index (PDI), and the zeta potential of a nanoparticle composition can be determined using, for example, a Zetasizer Nano ZS (Malvern Instruments Ltd, Malvern, Worcestershire, UK), or a Wyatt DynaPro plate reader.

[3218] Ultraviolet-visible spectroscopy can be used to determine the concentration of the genome editing system in the nanoparticle compositions. The formulation may be diluted in PBS then added to a mixture of methanol and chloroform. After mixing, the absorbance spectrum of the solution is recorded, for example, between 230 nm and 330 nm on a DU 800 spectrophotometer (Beckman Coulter, Beckman Coulter, Inc., Brea, Calif.). The concentration of the genome editing system in the nanoparticle composition can be calculated based on the extinction coefficient of the genome editing system used in the composition and on the difference between the absorbance at a wavelength of, for example, 260 nm and the baseline value at a wavelength of, for example, 330 nm.

[3219] For nanoparticle compositions including an RNA, a QUANT-IT™ RIBOGREEN® RNA assay (Invitrogen Corporation Carlsbad, Calif.) can be used to evaluate the encapsulation of an RNA by the nanoparticle composition. The samples are diluted in a TE buffer solution. Portions of the diluted samples are transferred to a polystyrene 96 well plate and either TE buffer or a 2% Triton X-100 solution is added to the wells. The plate is incubated at, for example, a temperature of 37° C. for 15 minutes. The RIBOGREEN® reagent is diluted in TE buffer, and this solution is added to each well. The fluorescence intensity can be measured using a fluorescence plate reader (Wallac Victor 1420 Multilabel Counter; Perkin Elmer, Waltham, Mass.) at an excitation wavelength of, for example, about 480 nm and an emission wavelength of, for example, about 520 nm. The fluorescence values of the reagent blank are subtracted from that of each of the samples and the percentage of free RNA is determined by dividing the fluorescence intensity of the intact sample (without addition of Triton X-100) by the fluorescence value of the disrupted sample (caused by the addition of Triton X-100).

### Example 3: In Vivo Studies Including Protein Expression by Organ

[3220] Delivery to a target organ may be assessed as described in US patent application US20170210697A1, which is incorporated herein by reference in its entirety.

[3221] In order to monitor how effectively various nanoparticle compositions deliver polynucleotides to targeted cells, different nanoparticle compositions including a particular polynucleotide are prepared and administered to rodent populations. Mice are intravenously, intramuscularly, intraarterially, or intratumorally administered a single dose of a nanoparticle composition. In some instances, mice may be made to inhale doses. Dose sizes may range from 0.001 mg/kg to 10 mg/kg, where 10 mg/kg describes a dose including 10 mg of polynucleotide in a nanoparticle composition for each 1 kg of body mass of the mouse. A control composition including PBS may also be employed.

[3222] Upon administration of nanoparticle compositions to mice, dose delivery profiles, dose responses, and toxicity of particular formulations and doses thereof can be measured by enzyme-linked immunosorbent assays (ELISA), bioluminescent imaging, or other methods. Time courses of protein expression can also be evaluated. Samples collected from the rodents for evaluation may include blood, sera, and tissue (for example, muscle tissue from the site of an intramuscular injection and internal tissue); sample collection may involve sacrifice of the animals.

[3223] For example, LNP formulations including RNA encoding a detectable protein such as luciferase may be administered intravenously to mice at a dosage of, for example, 0.5 mg/kg. A standard MC3 formulation and a PBS control may also be tested.

[3224] Bioluminescence in various organs, such as the liver, lung, spleen, and femur, may be measured after 6 hours.

[3225] Nanoparticle compositions including protein coding RNA are useful in the evaluation of the efficacy and usefulness of various formulations for the delivery of polynucleotides. Higher levels of protein expression induced by administration of a composition including protein coding RNA will be indicative of higher RNA translation and/or nanoparticle composition RNA delivery efficiencies. As the non-RNA components are not thought to affect translational machineries themselves, a higher level of protein expression is likely indicative of a higher efficiency of delivery of the RNA by a given nanoparticle composition relative to other nanoparticle compositions or the absence thereof.

### Example 4: Toxicity, Cytokine Induction, and Complement Activation

[3226] Toxicity of the LNP compositions of the disclosure may be analyzed as described by international patent application WO2016118724 and/or US20170210697A1, which are incorporated herein by reference in its entirety.

### Example 5: Optimization of Particle Sizes

[3227] The fenestration sizes for different bodily organs often vary; for example, the kidney is known to have a smaller fenestration size than the liver. Thus, targeting delivery of a genome editing system (e.g., specifically delivering) to a particular organ or group of organs may require the administration of nanoparticle compositions with different particle sizes. In order to investigate this effect, nanoparticle compositions are prepared with a variety of particle sizes using a Nanoassemblr® instrument. Nanoparticle compositions include an RNA encoding Luc. Each differently sized nanoparticle composition is subsequently administered to mice to evaluate the effect of particle size on delivery selectivity. Luc expression in two or more organs or groups of organs can be measured using bioluminescence to evaluate the relative expression in each organ.

[3228] A number of parameters can be adjusted in order to optimize the particle size of the nanoparticles. Exemplary parameters include, but are not limited to, the identity of the PEG lipid, mol % of the PEG lipid in the LNP formulation, the identity of the structural lipid, mol % of the structural lipid in the LNP formulation, the identity of the phospholipid, mol % of the phospholipid in the LNP formulation, the identity of the ionizable lipid, mol % of the ionizable lipid in the LNP formulation, identity of lipid components covalently bound to one or more targeting moieties, mol % of said targeting moiety bound lipids in the LNP formulation, flow rate of the Nanoassemblr® instrument in the preparation of the formulation, concentration of the mixing solutions used in the formulation, buffers used in the preparation of the formulation, and duration of formulation mixing.

### Example 6: Construction and Testing an Cas12a Nuclease Genome Editor

[3229] To generate an Cas12a Nuclease Genome Editor, a human codon optimized Cas12a ORF is amplified from a vendor synthesized plasmid. In addition, the desired nuclear localization signal is encoded on the amplification primers. The amplified fragment containing the NLS and the human codon optimized Cas12a ORF are assembled using Gibson Assembly Master Mix (NEB), into the pCDNA3.1 vector (Thermo Scientific). The cognate crRNA for the indicated Cas12a ortholog is cloned under the control of the U6 promoter using Gibson Assembly Master Mix (NEB), into the pZ147-BvCas12b-sgRNA-scaffold vector (Addgene). The crRNA may be designed such that the guide sequence is replaced to match the desired target sequence with a cognate PAM for the indicated Cas12a ortholog, particularly the human genome in the case that the construct is to be used in a human genome editing experiment. In experiments where the Cas12a is mutated, the desired mutation is created by amplifying the entire plasmid in a single amplicon where the primer encodes the mutation and is cloned using the KLD enzyme mix (NEB). To evaluate the efficacy of the system, 100 ng of each of the Cas12a plasmid and the crRNA plasmid are transfected using Lipo 3000 (Thermo Scientific) into HEK293FT cells into a single well of a 96-well plate. The cells are left to incubate for 72 hours before they are harvested for sequencing. Quick Extract DNA solution is to extract gDNA from cells for subsequent NGS analysis of the targeted loci.

### Example 7: Constructing and Testing an Cas12a-Deaminase Fusion

[3230] To generate an Cas12a-deaminase fusion construct, both a human codon optimized Cas12a ORF and a desired human codon optimized deaminase are amplified from plasmids with primer overhangs containing the desired linker sequence. In addition, the desired nuclear localization signal is encoded on the amplification primers. Two amplified fragments containing the Cas12a ORF and deaminase are stitched together using Gibson Assembly Master Mix (NEB), into the pCDNA3.1 vector (Thermo Scientific). The cognate crRNA for the indicated Cas12a ortholog is cloned under the control of the U6 promoter using Gibson Assembly Master Mix (NEB), into the pZ147-BvCas12b-sgRNA-scaffold vector (Addgene). The crRNA may be designed such that the guide sequence is replaced to match the desired target sequence with a cognate PAM for the indicated Cas12a ortholog, particularly the human genome in the case that the construct is to be used in a human genome editing experiment. In experiments where the Cas12a is mutated, the desired mutation is created by amplifying the entire plasmid in a single amplicon where the primer encodes the mutation and is cloned using the KLD enzyme mix (NEB). To evaluate the efficacy of the system, 100 ng of each of the Cas12a-deaminase plasmid and the crRNA plasmid are transfected using Lipo 3000 (Thermo Scientific) into HEK293FT cells into a single well of a 96-well plate. The cells are left to incubate for 72 hours before they are harvested for sequencing. Quick Extract DNA solution is used to extract gDNA from cells for subsequent NGS analysis of the targeted loci.

### Example 8: Constructing and Testing an Cas12a-RT Fusion

[3231] To generate an Cas12a-RT fusion construct, both a human codon optimized Cas12a ORF and a desired human codon optimized RT are amplified from plasmids with primer overhangs containing the desired linker sequence. In addition, the desired nuclear localization signal is encoded on the amplification primers. Two amplified fragments containing the Cas12a ORF and RT are stitched together using Gibson Assembly Master Mix (NEB), into the pCDNA3.1 vector (Thermo Scientific). The cognate extended and engineered crRNA for the indicated Cas12a ortholog is cloned under the control of the U6 promoter using Gibson Assembly Master Mix (NEB), into the pZ147-BvCas12b-sgRNA-scaffold vector (Addgene). The extended crRNA is designed such that the guide sequence is replaced to match the desired target sequence with a cognate TAM for the indicated Cas12a ortholog, particularly the human genome in the case that the construct is to be used in a human genome editing experiment. In addition, a crRNA extension that contains a template for the desired edit, along with a homologous sequence designed to bind to the Cas12a non-target strand are included in the engineered crRNA. In experiments where the Cas12a is mutated, the desired mutation is created by amplifying the entire plasmid in a single amplicon where the primer encodes the mutation and is cloned using the KLD enzyme mix (NEB). In experiments where a second Cas12a ORF is included in the system, it may be expressed from a separate pCDNA3.1 vector. To evaluate the efficacy of the system, 100 ng of each of the Cas12a-RT plasmid and the crRNA plasmid are transfected using Lipo 3000 (Thermo Scientific) into HEK293FT cells into a single well of a 96-well plate. The cells are left to incubate for 72 hours before they are harvested for sequencing. Quick Extract DNA solution is used to extract gDNA from cells for subsequent NGS analysis of the targeted loci.

### Example 9: In Vitro Activity Screening and PAM Determination

[3232] To detect dsDNA cleavage and characterize the protospacer adjacent motif (PAM) requirement Cas12a orthologs were initially expressed in Human embryonic kidney (HEK) cell line 293T (ATCC-CRL-3216). HEK293T cells were maintained in Dulbecco's modified Eagle's Medium (DMEM) with GlutaMAX (Thermo Fisher Scientific), supplemented with 10% fetal bovine serum (Thermo Fisher Scientific) and 10,000 units/mL penicillin, and 10,000 μg/mL streptomycin (Thermo Fisher Scientific) at 37° C. with 5% CO₂ incubation.

[3233] HEK293T cells were seeded into 24-well plates (VWR) one day prior to transfection at a density of 100,000 cells per well. Cells were transfected using Lipofectamine 3000 (Invitrogen) following the manufacturer's recommended protocol. For each well of a 24-well plate 800 ng of plasmid DNA (pcDNA3.1-Cas12a-EGFP) encoding Cas12a was used. One well per plate was transfected using 800 ng of plasmid DNA (pD608-SpCas9-EGFP) encoding SpCas9 to use as a control.

[3234] Cells were incubated at 37° C. for 48 hours post transfection in 5% CO2 before lysis. The cells were washed twice with 900 μl 1×DPBS (Thermo Fisher Scientific) and resuspended in 100 μl 20 mM HEPES, 100 mM KCl, 5 mM MgCl₂, 5% glycerol, 0.1% Triton X-100, 1 mM DTT, 1×Halt Protease Inhibitor Cocktail (Thermo Scientific), pH 7.5 lysis buffer. Resuspended cells were incubated on ice for 20 minutes. Cell lysates were further used for activity determination in vitro as described below.

[3235] Ribonucleoprotein complexes were assembled using cell lysates and 100 nM or 1000 nM of appropriate crRNA; total reaction volume—10 μL. Reactions were incubated on ice for 15 minutes. 5 μL of RNP complex was used for 7N PAM library cleavage. 0.5 μg of the 7N PAM plasmid library was used, reaction buffer—NEBuffer 2.1 (New England Biolabs), total volume—50 μL. To achieve library cleavage reactions were incubated at 37° C. for 1 hour. Double-stranded break ends were blunted by adding 0.3 uL 10 mM dNTPs and 0.3 μL of T4 DNA polymerase and incubating at 12° C. for 15 minutes and 75° C. for 25 minutes. To add A-overhangs to blunt ends 0.3 μL 10 mM dNTPs and 0.3 μL of DreamTaq DNA polymerase (Thermo Scientific) were added to the reactions and incubated at 68° C. for 30 minutes. RNA removal was performed using 0.5 μL of RNase A (Thermo Scientific), samples incubated at 37° C. for 15 minutes. Cleaved DNA was purified using Monarch PCR & DNA Cleanup Kit (5 μg) (New England Biolabs). 100 ng of double stranded DNA linker was added to each reaction together with 2.5 μL ligation buffer (New England Biolabs) and 1 μL T4 DNA Ligase (New England Biolabs) (final reaction volume—25 μL). Reactions were incubated at 22° C. for 1 hour. 2 μL of each ligation mixture was used as a PCR template. PCR products were visualized by performing gel electrophoresis (1.5% agarose gel).

[3236] To determine PAM sequences, next generation sequencing was performed using Illumina MiSeq System. Using ligation mixtures as templates, PCR was performed to enrich for PAM-containing sequences (reaction volume—100 μL). Samples were then purified using Monarch PCR & DNA Cleanup Kit (5 μg) (New England Biolabs). Purified DNA was then used as a template for primary PCR. Primers that extend past the end of library fragments with ‘tails’ encoding Illumina sequences and sample-specific 6 nt barcodes (IDT, Metabion) were used. Phusion High-Fidelity DNA Polymerase (New England Biolabs) was used for both rounds of PCR and the reactions were set up according to the manufacturer's instructions in a final volume of 50 μl and allowed to proceed for 10 cycles. In the case of primary PCR 20 ng of the purified product from the previous step was used as template and for the secondary PCR 2 μL of the primary PCR reaction was used as template. The primary PCR forward primer contained a sample-specific barcode sequence in addition to the necessary Illumina sequences. The rest of the primers were universal and contained Illumina sequences only (Table Ex. 9.1). The following conditions were used for the primary two-step PCR: 95° C. for 30 s, 10 cycles of 95° C. for 10 s and 72° C. for 5 s, and final extension at 72° C. for 5 min. The secondary PCR was performed as follows: 95° C. for 30 s, 10 cycles of 95° C. for 10 s, 58° C. for 15 s and 72° C. for 5 s, and final extension at 72° C. for 5 min. The secondary PCR products were purified using Monarch PCR & DNA Cleanup Kit (New England Biolabs), their concentration and quality assessed using NanoPhotometer® NP80 (IMPLEN) spectrophotometer and Qubit 4 (Thermo Fisher Scientific) fluorometer with the Qubit 1×dsDNA HS Assay kit (Thermo Fisher Scientific). Samples from uncleaved PAM libraries were used as negative control and libraries cleaved with LbaCas12a and SpyCas9 were used as positive control.

TABLE Ex
9.1. Primers used in PAM sample preparation for Illumina sequencing

| Primer | Primer sequence (5′-3′), | |
|---|---|---|
| no. | molecular barcode sequences underlined | Description |
| 1 | CGGCATTCCTGCTGAACCGCTCTTCCGATCT (SEQ ID NO: 717) | Enrichment PCR forward primer |
| 3 | GCCAGGGTTTTCCCAGTCACGA (SEQ ID NO: 718) | Enrichment PCR reverse primer |
| 4 | GAAATTCTAAACGCTAAAGAGGAAGAGG (SEQ ID NO: 719) | Negative control sample |
| | | enrichment PCR forward primer |
| 5 | CTACACTCTTTCCCTACACGACGCTCTTCCGATCTAGTCAATA | Negative control primary PCR |
| | AACGCTAAAGAGGAAGAGG (SEQ ID NO: 720) | barcoding primer |
| 6 | CTACACTCTTTCCCTACACGACGCTCTTCCGATCTATTCCTCGG | Primary PCR barcoding primer |
| | CATTCCTGCTGAAC (SEQ ID NO: 721) | |
| 7 | CTACACTCTTTCCCTACACGACGCTCTTCCGATCTGCCAATCG | Primary PCR barcoding primer |
| | GCATTCCTGCTGAAC (SEQ ID NO: 722) | |
| 8 | CTACACTCTITCCCTACACGACGCTCTTCCGATCTCTTGTACG | Primary PCR barcoding primer |
| | GCATTCCTGCTGAAC (SEQ ID NO: 723) | |
| 9 | CTACACTCTTTCCCTACACGACGCTCTTCCGATCTTTAGGCCG | Primary PCR barcoding primer |
| | GCATTCCTGCTGAAC (SEQ ID NO: 724) | |
| 10 | CTACACTCTTTCCCTACACGACGCTCTTCCGATCTTAGCTTCG | Primary PCR barcoding primer |
| | GCATTCCTGCTGAAC (SEQ ID NO: 725) | |
| 11 | CTACACTCTTTCCCTACACGACGCTCTTCCGATCTAGTTCCCG | Primary PCR barcoding primer |
| | GCATTCCTGCTGAAC (SEQ ID NO: 726) | |
| 12 | CTACACTCTTTCCCTACACGACGCTCTTCCGATCTATCACGCG | Primary PCR barcoding primer |
| | GCATTCCTGCTGAAC (SEQ ID NO: 727) | |
| 13 | CTACACTCTTTCCCTACACGACGCTCTTCCGATCTGAGTGGCG | Primary PCR barcoding primer |
| | GCATTCCTGCTGAAC (SEQ ID NO: 728) | |
| 14 | CTACACTCTTTCCCTACACGACGCTCTTCCGATCTGGCTACCG | Primary PCR barcoding primer |
| | GCATTCCTGCTGAAC (SEQ ID NO: 729) | |
| 15 | CTACACTCTTTCCCTACACGACGCTCTTCCGATCTACAGTGCG | Primary PCR barcoding primer |
| | GCATTCCTGCTGAAC (SEQ ID NO: 730) | |
| 16 | CTACACTCTTTCCCTACACGACGCTCTTCCGATCTTGACCACG | Primary PCR barcoding primer |
| | GCATTCCTGCTGAAC (SEQ ID NO: 731) | |
| 17 | CTACACTCTTTCCCTACACGACGCTCTTCCGATCTCAGATCCG | Primary PCR barcoding primer |
| | GCATTCCTGCTGAAC (SEQ ID NO: 732) | |
| 18 | CTACACTCTTTCCCTACACGACGCTCTTCCGATCTGATCAGCG | Primary PCR barcoding primer |
| | GCATTCCTGCTGAAC (SEQ ID NO: 733) | |
| 19 | CTACACTCTTTCCCTACACGACGCTCTTCCGATCTCGATGTCG | Primary PCR barcoding primer |
| | GCATTCCTGCTGAAC (SEQ ID NO: 734) | |
| 20 | CTACACTCTTTCCCTACACGACGCTCTTCCGATCTCCGTCCCG | Primary PCR barcoding primer |
| | GCATTCCTGCTGAAC (SEQ ID NO: 735) | |
| 21 | CTACACTCTTTCCCTACACGACGCTCTTCCGATCTGTCCGCCG | Primary PCR barcoding primer |
| | GCATTCCTGCTGAAC (SEQ ID NO: 736) | |
| 22 | CTACACTCTTTCCCTACACGACGCTCTTCCGATCTACTTGACG | Primary PCR barcoding primer |
| | GCATTCCTGCTGAAC (SEQ ID NO: 737) | |
| 23 | CTACACTCTTTCCCTACACGACGCTCTTCCGATCTCGTACGCG | Primary PCR barcoding primer |
| | GCATTCCTGCTGAAC (SEQ ID NO: 738) | |
| 24 | CTACACTCTTTCCCTACACGACGCTCTTCCGATCTATGTCACG | Primary PCR barcoding primer |
| | GCATTCCTGCTGAAC (SEQ ID NO: 739) | |
| 25 | CTACACTCTTTCCCTACACGACGCTCTTCCGATCTGTGAAACG | Primary PCR barcoding primer |
| | GCATTCCTGCTGAAC (SEQ ID NO: 740) | |
| 26 | CTACACTCTTTCCCTACACGACGCTCTTCCGATCTGTGGCCCG | Primary PCR barcoding primer |
| | GCATTCCTGCTGAAC (SEQ ID NO: 741) | |
| 27 | CTACACTCTTTCCCTACACGACGCTCTTCCGATCTGTTTCGCG | Primary PCR barcoding primer |
| | GCATTCCTGCTGAAC (SEQ ID NO: 742) | |
| 28 | CTACACTCTTTCCCTACACGACGCTCTTCCGATCTACTGATCG | Primary PCR barcoding primer |
| | GCATTCCTGCTGAAC (SEQ ID NO: 743) | |
| 29 | CTACACTCTTTCCCTACACGACGCTCTTCCGATCTGTAGAGCG | Primary PCR barcoding primer |
| | GCATTCCTGCTGAAC (SEQ ID NO: 744) | |
| 30 | CAAGCAGAAGACGGCATACGAGCTCTTCCGATCTCGGCGAC | Primary PCR universal reverse |
| | GTTGGGTC (SEQ ID NO: 745) | primer |
| 31 | AATGATACGGCGACCACCGAGATCTACACTCTTTCCCTACAC | Secondary PCR universal |
| | G (SEQ ID NO: 746) | forward primer |
| 32 | CAAGCAGAAGACGGCATA (SEQ ID NO: 747) | Secondary PCR universal reverse |
| | | primer |

[3237] Sample libraries were normalized and pooled in equimolar ratio for sequencing. The resulting pool was purified and size selection performed using Ampure XP magnetic beads (Beckman Coulter Inc), then quantified via qPCR using NEBNext Library Quant Kit for Illumina (New England Biolabs). Final library pool was diluted and denatured for sequencing on Illumina MiSeq System (Illumina) with a 25% (v/v) spike of PhiX control v3 (Illumina). Single read deep sequencing was performed and the resulting sequences were post-processed and deconvoluted per the manufacturer's instruction.

[3238] PAM sequence recognition was identified for each protein by first generating a collection of sequences that represent all possible outcomes of double stranded DNA cleavage and adapter ligation within the target region. For all the reads that matched these sequences which correspond to cleavage events the adjacent Int PAM sequences which promote the double stranded nuclease activity were extracted. The position-specific nucleotide preference was examined by first counting the identical PAM sequences, calculating their frequency within total reads and then normalizing the frequencies to the original uncleaved PAM library to account for under- or over-represented PAM sequences. Top 10% of the most enriched PAM sequences were used for further analysis. After normalization, a position frequency matrix (PFM) was calculated. This was done by weighting each nucleotide at each position based on the frequency (normalized) associated with each PAM. For example, if a PAM of 5′-CGGTAGC-3′; had a normalized frequency of 0.15%, then the C at first position would be given a frequency of 0.15% when determining the nucleotide frequency for the first PAM position. Next, the overall contribution of each nucleotide at each position in the dataset was summed and organized into a table with the most abundant nucleotides indicating Cas12a PAM preferences (Table Ex. 9.2), herein: A=Adenine, C=Cytosine, G=Guanine, T=Thymine, R=A or G, Y=C or T, S=G or C, W=A or T, D=A or G or T, H=A or C or T, K=G or T, M=A or C, N=any base, B=C or G or T, V=A or C or G) and displayed as a WebLogos organized in the protein phylogenetic tree (FIG. 15).

TABLE Ex. 9.2
Position frequency matrix for Cas12a protein PAMs

| | | | PAM Position | | | | | | | |
|---|---|---|---|---|---|---|---|---|---|---|
| | | | 1 | 2 | 3 | 4 | 5 | 6 | 7 | |
| ID401 | % | A | 0.30 | 0.30 | 0.30 | 0.06 | 0.00 | 0.00 | 0.52 | |
| | Nucleotide | T | 0.31 | 0.24 | 0.37 | 0.56 | 0.93 | 0.99 | 0.02 | |
| | | C | 0.20 | 0.23 | 0.19 | 0.32 | 0.07 | 0.01 | 0.27 | |
| | | G | 0.19 | 0.24 | 0.14 | 0.06 | 0.00 | 0.00 | 0.18 | |
| | Consensus | | N | N | N | Y(T > C) | T | T | V(A > B) | YTTV |
| ID402 | % | A | 0.31 | 0.28 | 0.37 | 0.03 | 0.19 | 0.00 | 0.17 | |
| | Nucleotide | T | 0.28 | 0.28 | 0.25 | 0.76 | 0.80 | 0.99 | 0.10 | |
| | | C | 0.20 | 0.25 | 0.10 | 0.15 | 0.00 | 0.01 | 0.58 | |
| | | G | 0.21 | 0.20 | 0.27 | 0.06 | 0.00 | 0.00 | 0.15 | |
| | Consensus | | N | N | N(A > K > C) | T | T | T | C | TTTC |
| ID403 | % | A | 0.29 | 0.20 | 0.36 | 0.10 | 0.00 | 0.00 | 0.25 | |
| | Nucleotide | T | 0.29 | 0.29 | 0.27 | 0.30 | 1.00 | 0.98 | 0.01 | |
| | | C | 0.22 | 0.26 | 0.21 | 0.36 | 0.00 | 0.02 | 0.54 | |
| | | G | 0.20 | 0.25 | 0.16 | 0.24 | 0.00 | 0.00 | 0.19 | |
| | Consensus | | N | N | N(A > Y > G) | N(Y > G > A) | T | T | V(C > R) | TTV |
| ID404 | % | A | 0.26 | 0.20 | 0.35 | 0.02 | 0.00 | 0.00 | 0.47 | |
| | Nucleotide | T | 0.34 | 0.35 | 0.25 | 0.75 | 0.99 | 1.00 | 0.02 | |
| | | C | 0.20 | 0.25 | 0.20 | 0.18 | 0.01 | 0.00 | 0.28 | |
| | | G | 0.20 | 0.19 | 0.20 | 0.05 | 0.00 | 0.00 | 0.23 | |
| | Consensus | | N | N | N | T | T | T | V(A > S) | TTTV |
| ID405 | % | A | 0.32 | 0.30 | 0.41 | 0.07 | 0.02 | 0.00 | 0.35 | |
| | Nucleotide | T | 0.27 | 0.27 | 0.28 | 0.58 | 0.90 | 0.95 | 0.09 | |
| | | C | 0.19 | 0.20 | 0.16 | 0.31 | 0.05 | 0.05 | 0.41 | |
| | | G | 0.22 | 0.23 | 0.15 | 0.04 | 0.03 | 0.00 | 0.15 | |
| | Consensus | | N | N | N(A > T > S) | Y(T > C) | T | T | V(C > A > G) | YTTV |
| ID406 | % | A | 0.31 | 0.28 | 0.36 | 0.06 | 0.00 | 0.00 | 0.51 | |
| | Nucleotide | T | 0.30 | 0.30 | 0.31 | 0.64 | 0.90 | 0.98 | 0.04 | |
| | | C | 0.20 | 0.23 | 0.14 | 0.25 | 0.10 | 0.02 | 0.26 | |
| | | G | 0.19 | 0.19 | 0.19 | 0.05 | 0.00 | 0.00 | 0.19 | |
| | Consensus | | N | N | Z | Y(T > C) | T | T | V(A > C > G) | YTTV |
| ID407 | % | A | 0.35 | 0.34 | 0.40 | 0.07 | 0.03 | 0.00 | 0.37 | |
| | Nucleotide | T | 0.27 | 0.29 | 0.29 | 0.75 | 0.79 | 0.97 | 0.01 | |
| | | C | 0.16 | 0.18 | 0.17 | 0.18 | 0.19 | 0.03 | 0.34 | |
| | | G | 0.21 | 0.19 | 0.14 | 0.00 | 0.00 | 0.00 | 0.28 | |
| | Consensus | | N | N | N(A > T > S) | T | T | T | V | TTTV |
| ID408 | % | A | 0.28 | 0.25 | 0.40 | 0.05 | 0.00 | 0.00 | 0.53 | |
| | Nucleotide | T | 0.31 | 0.30 | 0.34 | 0.48 | 1.00 | 1.00 | 0.01 | |
| | | C | 0.23 | 0.24 | 0.07 | 0.44 | 0.00 | 0.00 | 0.28 | |
| | | G | 0.19 | 0.22 | 0.20 | 0.02 | 0.00 | 0.00 | 0.18 | |
| | Consensus | | N | N | D(W > G) | Y | T | T | V(A > S) | YTTV |
| ID409 | % | A | 0.23 | 0.15 | 0.35 | 0.34 | 0.00 | 0.00 | 0.00 | |
| | Nucleotide | T | 0.35 | 0.30 | 0.29 | 0.30 | 0.15 | 0.79 | 0.00 | |
| | | C | 0.25 | 0.31 | 0.14 | 0.19 | 0.85 | 0.17 | 1.00 | |
| | | G | 0.17 | 0.25 | 0.21 | 0.18 | 0.00 | 0.03 | 0.00 | |
| | Consensus | | N | N | N | N(W > S) | C | T | C | CTC |
| ID410 | % | A | 0.34 | 0.34 | 0.42 | 0.43 | 0.03 | 0.03 | 0.27 | |
| | Nucleotide | T | 0.28 | 0.29 | 0.32 | 0.37 | 0.49 | 0.76 | 0.08 | |
| | | C | 0.20 | 0.18 | 0.11 | 0.13 | 0.48 | 0.18 | 0.57 | |
| | | G | 0.18 | 0.19 | 0.15 | 0.08 | 0.00 | 0.03 | 0.08 | |
| | Consensus | | N | N | N(W > S) | H(A > T > C) | Y | T | M(C > A) | HYTM |
| ID411 | % | A | 0.27 | 0.24 | 0.38 | 0.01 | 0.00 | 0.00 | 0.39 | |
| | Nucleotide | T | 0.31 | 0.28 | 0.25 | 0.81 | 1.00 | 0.99 | 0.01 | |
| | | C | 0.19 | 0.23 | 0.21 | 0.16 | 0.00 | 0.01 | 0.32 | |
| | | G | 0.22 | 0.25 | 0.16 | 0.02 | 0.00 | 0.00 | 0.28 | |
| | Consensus | | N | N | N | T | T | T | V | TTTV |
| ID412 | % | A | 0.43 | 0.38 | 0.31 | 0.01 | 0.01 | 0.01 | 0.49 | |
| | Nucleotide | T | 0.21 | 0.29 | 0.38 | 0.98 | 0.99 | 0.99 | 0.01 | |
| | | C | 0.16 | 0.16 | 0.15 | 0.01 | 0.00 | 0.00 | 0.19 | |
| | | G | 0.20 | 0.17 | 0.16 | 0.00 | 0.00 | 0.00 | 0.31 | |
| | Consensus | | N(A > B) | N | N(W > S) | T | T | T | V(A > G > C) | TTTV |
| ID413 | % | A | 0.36 | 0.29 | 0.37 | 0.00 | 0.00 | 0.00 | 0.29 | |
| | Nucleotide | T | 0.26 | 0.24 | 0.27 | 0.81 | 1.00 | 0.81 | 0.09 | |
| | | C | 0.20 | 0.25 | 0.22 | 0.19 | 0.00 | 0.19 | 0.44 | |
| | | G | 0.18 | 0.21 | 0.13 | 0.00 | 0.00 | 0.00 | 0.18 | |
| | Consensus | | N | N | N | T | T | T | V(C > A > G) | TTTV |
| ID414 | % | A | 0.31 | 0.27 | 0.35 | 0.01 | 0.00 | 0.00 | 0.46 | |
| | Nucleotide | T | 0.27 | 0.28 | 0.29 | 0.95 | 0.99 | 0.99 | 0.02 | |
| | | C | 0.23 | 0.27 | 0.19 | 0.04 | 0.01 | 0.01 | 0.35 | |
| | | G | 0.20 | 0.18 | 0.16 | 0.00 | 0.00 | 0.00 | 0.17 | |
| | Consensus | | N | N | N | T | T | T | V(A > C > G) | TTTV |
| ID415 | % | A | 0.27 | 0.26 | 0.37 | 0.07 | 0.00 | 0.00 | 0.32 | |
| | Nucleotide | T | 0.34 | 0.32 | 0.28 | 0.63 | 0.92 | 0.98 | 0.01 | |
| | | C | 0.20 | 0.22 | 0.18 | 0.18 | 0.07 | 0.02 | 0.45 | |
| | | G | 0.20 | 0.20 | 0.18 | 0.12 | 0.00 | 0.00 | 0.22 | |
| | Consensus | | N | N | N | T | T | T | V(C > A > G) | TTTV |
| ID416 | % | A | 0.35 | 0.37 | 0.35 | 0.04 | 0.02 | 0.02 | 0.21 | |
| | Nucleotide | T | 0.30 | 0.21 | 0.39 | 0.93 | 0.95 | 0.94 | 0.04 | |
| | | C | 0.19 | 0.24 | 0.06 | 0.01 | 0.01 | 0.03 | 0.29 | |
| | | G | 0.15 | 0.17 | 0.20 | 0.02 | 0.01 | 0.01 | 0.46 | |
| | Consensus | | N | N | D(W > G) | T | T | T | V(G > M) | DTTV |
| ID417 | % | A | 0.29 | 0.27 | 0.40 | 0.14 | 0.00 | 0.08 | 0.38 | |
| | Nucleotide | T | 0.32 | 0.29 | 0.27 | 0.70 | 1.00 | 0.86 | 0.01 | |
| | | C | 0.19 | 0.22 | 0.17 | 0.13 | 0.00 | 0.06 | 0.33 | |
| | | G | 0.19 | 0.22 | 0.16 | 0.03 | 0.00 | 0.00 | 0.28 | |
| | Consensus | | N | N | N(A > T > S) | T | T | T | V | TTTV |
| ID418 | % | A | 0.35 | 0.30 | 0.38 | 0.11 | 0.00 | 0.00 | 0.36 | |
| | Nucleotide | T | 0.27 | 0.31 | 0.30 | 0.65 | 0.93 | 0.90 | 0.06 | |
| | | C | 0.20 | 0.20 | 0.14 | 0.23 | 0.07 | 0.10 | 0.43 | |
| | | G | 0.18 | 0.18 | 0.19 | 0.02 | 0.00 | 0.00 | 0.15 | |
| | Consensus | | N | N | N(W > S) | H(T > C > A) T | | T | V(M > G) | HTTV |
| ID419 | % | A | 0.29 | 0.25 | 0.36 | 0.02 | 0.00 | 0.00 | 0.42 | |
| | Nucleotide | T | 0.31 | 0.31 | 0.27 | 0.79 | 1.00 | 1.00 | 0.00 | |
| | | C | 0.18 | 0.21 | 0.22 | 0.18 | 0.00 | 0.00 | 0.29 | |
| | | G | 0.22 | 0.23 | 0.15 | 0.01 | 0.00 | 0.00 | 0.29 | |
| | Consensus | | N | N | N | T | T | T | V(A > S) | TTTV |
| ID420 | % | A | 0.34 | 0.30 | 0.42 | 0.12 | 0.00 | 0.00 | 0.48 | |
| | Nucleotide | T | 0.28 | 0.29 | 0.33 | 0.78 | 0.97 | 0.90 | 0.04 | |
| | | C | 0.20 | 0.21 | 0.11 | 0.07 | 0.03 | 0.10 | 0.35 | |
| | | G | 0.18 | 0.21 | 0.14 | 0.03 | 0.00 | 0.00 | 0.13 | |
| | Consensus | | N | N | N(W > S) | T | T | T | V(A > C > G) | TTTV |
| ID421 | % | A | 0.36 | 0.28 | 0.39 | 0.00 | 0.01 | 0.00 | 0.33 | |
| | Nucleotide | T | 0.26 | 0.27 | 0.29 | 0.83 | 0.99 | 0.81 | 0.06 | |
| | | C | 0.20 | 0.26 | 0.19 | 0.17 | 0.00 | 0.19 | 0.46 | |
| | | G | 0.18 | 0.19 | 0.13 | 0.00 | 0.01 | 0.00 | 0.16 | |
| | Consensus | | N | N | N(W > S) | T | T | T | V(C > A > G) | TTTV |
| ID422 | % | A | 0.33 | 0.21 | 0.37 | 0.00 | 0.00 | 0.00 | 0.29 | |
| | Nucleotide | T | 0.26 | 0.29 | 0.30 | 1.00 | 1.00 | 0.91 | 0.00 | |
| | | C | 0.18 | 0.27 | 0.30 | 0.00 | 0.00 | 0.09 | 0.38 | |
| | | G | 0.23 | 0.23 | 0.03 | 0.00 | 0.00 | 0.00 | 0.33 | |
| | Consensus | | N | N | H | T | T | T | V | HTTTV |
| ID423 | % | A | 0.25 | 0.19 | 0.17 | 0.18 | 0.00 | 0.00 | 0.03 | |
| | Nucleotide | T | 0.38 | 0.30 | 0.12 | 0.23 | 1.00 | 0.99 | 0.00 | |
| | | C | 0.22 | 0.23 | 0.00 | 0.36 | 0.00 | 0.01 | 0.85 | |
| | | G | 0.15 | 0.28 | 0.72 | 0.23 | 0.00 | 0.00 | 0.12 | |
| | Consensus | | N | N | G | N | T | T | C | GNTTC |
| ID424 | % | A | 0.35 | 0.32 | 0.41 | 0.40 | 0.03 | 0.00 | 0.40 | |
| | Nucleotide | T | 0.28 | 0.29 | 0.32 | 0.48 | 0.78 | 0.95 | 0.06 | |
| | | C | 0.20 | 0.20 | 0.12 | 0.07 | 0.19 | 0.05 | 0.42 | |
| | | G | 0.17 | 0.19 | 0.15 | 0.04 | 0.00 | 0.00 | 0.12 | |
| | Consensus | | N | N | N(A > T > S) | W | T | T | V(M > G) | WTTV |
| ID425 | % | A | 0.35 | 0.35 | 0.38 | 0.17 | 0.01 | 0.04 | 0.48 | |
| | Nucleotide | T | 0.28 | 0.25 | 0.31 | 0.76 | 0.99 | 0.94 | 0.01 | |
| | | C | 0.20 | 0.20 | 0.13 | 0.07 | 0.01 | 0.01 | 0.31 | |
| | | G | 0.16 | 0.20 | 0.19 | 0.01 | 0.00 | 0.00 | 0.20 | |
| | Consensus | | N | N | N(W > S) | T | T | T | V(A > C > G) | TTTV |
| ID426 | % | A | 0.35 | 0.38 | 0.41 | 0.19 | 0.03 | 0.00 | 0.22 | |
| | Nucleotide | T | 0.29 | 0.28 | 0.28 | 0.60 | 0.97 | 1.00 | 0.11 | |
| | | C | 0.22 | 0.16 | 0.08 | 0.13 | 0.00 | 0.00 | 0.53 | |
| | | G | 0.15 | 0.19 | 0.23 | 0.08 | 0.00 | 0.00 | 0.14 | |
| | Consensus | | N | N | D(A > K) | T | T | T | N(C > D) | DTTTN |
| ID427 | % | A | 0.35 | 0.33 | 0.35 | 0.05 | 0.00 | 0.00 | 0.40 | |
| | Nucleotide | T | 0.29 | 0.27 | 0.29 | 0.74 | 0.92 | 0.89 | 0.11 | |
| | | C | 0.20 | 0.21 | 0.20 | 0.20 | 0.08 | 0.11 | 0.33 | |
| | | G | 0.16 | 0.18 | 0.16 | 0.01 | 0.00 | 0.00 | 0.17 | |
| | Consensus | | N | N | N | T | T | T | N(M > K) | TTTM |
| ID428 | % | A | 0.24 | 0.19 | 0.38 | 0.30 | 0.00 | 0.01 | 0.00 | |
| | Nucleotide | T | 0.35 | 0.22 | 0.26 | 0.29 | 0.07 | 0.66 | 0.01 | |
| | | C | 0.23 | 0.27 | 0.03 | 0.22 | 0.93 | 0.24 | 0.99 | |
| | | G | 0.19 | 0.32 | 0.33 | 0.19 | 0.00 | 0.09 | 0.00 | |
| | Consensus | | N | N | D | N | C | Y(T > C) | C | DNCYC |
| ID429 | % | A | 0.32 | 0.30 | 0.42 | 0.09 | 0.00 | 0.00 | 0.46 | |
| | Nucleotide | T | 0.27 | 0.25 | 0.28 | 0.66 | 0.98 | 0.99 | 0.05 | |
| | | C | 0.22 | 0.23 | 0.16 | 0.22 | 0.02 | 0.01 | 0.33 | |
| | | G | 0.20 | 0.21 | 0.14 | 0.03 | 0.00 | 0.00 | 0.16 | |
| | Consensus | | N | N | N(A > C > S) | T | T | T | V(A > C > G) | TTTV |
| ID432 | % | A | 0.34 | 0.27 | 0.41 | 0.03 | 0.00 | 0.00 | 0.41 | |
| | Nucleotide | T | 0.25 | 0.29 | 0.32 | 0.82 | 0.95 | 0.91 | 0.00 | |
| | | C | 0.20 | 0.25 | 0.15 | 0.15 | 0.05 | 0.08 | 0.36 | |
| | | G | 0.21 | 0.20 | 0.13 | 0.00 | 0.00 | 0.00 | 0.23 | |
| | Consensus | | N | N | N(W > S) | T | T | T | V(A > C > G) | TTTV |
| ID433 | % | A | 0.36 | 0.32 | 0.35 | 0.33 | 0.00 | 0.00 | 0.08 | |
| | Nucleotide | T | 0.27 | 0.23 | 0.25 | 0.43 | 0.49 | 0.71 | 0.00 | |
| | | C | 0.22 | 0.15 | 0.01 | 0.19 | 0.51 | 0.29 | 0.87 | |
| | | G | 0.16 | 0.30 | 0.39 | 0.04 | 0.00 | 0.00 | 0.06 | |
| | Consensus | | N | N | D | H(T > A > G) | Y | T | C | DHYTC |

### Example 10. Genome Editing Determination by T7 Endo Assay

[3239] To determine gene editing efficiencies the Human embryonic kidney (HEK) cell line 293T (ATCC-CRL-3216) were transfected with plasmid encoding Cas12a and PCR fragment encoding U6 promoter, crRNA and HDV ribozyme. The activity of each protein was tested using 2 different sites (RUNX1 and SCN1A). Sequences of the targets and crRNA encoding fragments are provided in the supplementary file.

[3240] For that HEK293T cells were maintained in Dulbecco's modified Eagle's Medium (DMEM) with GlutaMAX (Thermo Fisher Scientific), supplemented with 10% fetal bovine serum (Thermo Fisher Scientific) and 10,000 units/mL penicillin, and 10,000 μg/mL streptomycin (Thermo Fisher Scientific) at 37° C. with 5% CO2 incubation.

[3241] HEK293T cells were seeded into 96-well plates (Thermo Fisher Scientific) one day prior to transfection at a density of 18,000 cells per well. Cells were transfected using FuGENE HD (Promega Corporation) following the manufacturer's recommended protocol. For each well of a 96-well plate a total amount of 350 ng DNA containing 50 fmol of plasmid encoding Cas12a and 50 fmol of PCR fragment with appropriate U6-crRNA-HDV template was used.

[3242] Cells were incubated at 37° C. for 96 hours post transfection in 5% CO2 before genomic DNA extraction. The cells were washed twice with 200 μl 1×DPBS (Thermo Fisher Scientific) and resuspended in 25 μl 150 mM Tris-HCl, 150 mM NaCl, 0.05% Tween 20, pH 7.6 (Sigma Aldrich) and 0.2 mg/ml Proteinase K (New England Biolabs) lysis buffer.

[3243] Resuspended cells were incubated at 55° C. for 60 minutes and 95° C. for 15 minutes. Genomic region surrounding each Cas12a target site was PCR amplified using primers defined in the Table Ex. 10.1 PCR amplification was performed using Q5 Hot Start High-Fidelity 2× Master Mix (New England Biolabs) according to the manufacturer's instructions. The reaction was set up using 1 μl of the cell lysate and 0.5 μM of each primer in a final reaction volume of 25 ul.

TABLE Ex. 10.1.
Primer sequences used for target amplification in T7 Endonuclease I assay

| Target | Primer | Primer sequence 5′->3′ |
|---|---|---|
| DNMT1 | DNMT1_dir | GCCAAAGCCCGAGAGAGTG (SEQ ID NO: 748) |
| DNMT1 | DNMT1_rev | CCTCACACAACAGCTTCATG (SEQ ID NO: 749) |
| RUNX1 | RUNX1_dir | CATCACCAACCCACAGCCAAGG (SEQ ID NO: 750) |
| RUNX1 | RUNX1_rev | CCAGCACAACTTACTCGCACTTGAC (SEQ ID NO: 751) |
| SCN1A | SCN1A_dir | AGTCCAAGGAATGCAGTAGG (SEQ ID NO: 752) |
| SCN1A | SCN1A_rev | GGCACAGTTCCTGTATCAGT (SEQ ID NO: 753) |
| FANCF (amplicon 1) | FANCF1_dir | GCCCTACATCTGCTCTCCCTCC (SEQ ID NO: 754) |
| FANCF (amplicon 1) | FANCF1_rev | GGGCCGGGAAAGAGTTGCTG (SEQ ID NO: 755) |
| FANCF (amplicon 2) | FANCF2_dir | GCGACATAGGACCTTCTCCTCCC (SEQ ID NO: 756) |
| FANCF (amplicon 2) | FANCF2_rev | GGAGGGAGAGCAGATGTAGGGC (SEQ ID NO: 757) |

### Example 11. Genome Editing Frequencies were Estimated Using T7 Endonuclease I Assays

[3244] 25 μL of each PCR reaction was combined with 3 μL NEBuffer 2 (New England Biolabs) and 7 μL of water before denaturation at 95° C. for 5 minutes and re-annealing by temperature ramping from 95-85° C. at −2° C./s followed by ramping from 85-25° C. at −0.1° C./s. 1 μL of T7 Endonuclease I (New England Biolabs) was added to each re-annealed sample and cleavage reactions were incubated at 37° C. for 20 min. Fragments were analyzed by performing gel electrophoresis using E-Gel Precast Agarose Gel Electrophoresis system (Invitrogen). 2% gel with Ethidium bromide dye was used. 8 μL of each sample was mixed with 7 μL of E-Gel Sample Loading Buffer (Invitrogen) and the whole volume was loaded to the well. Genomic target cleavage percentage was calculated using ImageJ software. FIGS. 16, 17, 18, 19, and 20 demonstrates the editing efficiencies of LbaCas12a, ID405, ID406, ID411, ID414, ID415, ID418, and ID419 orthologs. FIG. 21 summarizes data from at least 3 repeats of such experiments.

### Example 12. Gene Editing Efficiency Determination by Deep-Sequencing

[3245] Lysates of the transfected HEK293T cells were prepared for deep sequencing to determine the activity of Cas12a orthologs in eukaryotic cells by studying the rates of NHEJ outcomes in the genomic target sites of treated cells. Briefly, the genomic target regions were amplified and fragments extended with Illumina sequences including a unique index for each sample through two rounds of PCR. The triplicate samples from a single experiment were combined into a single tube and 4 μL of the mix was used as template in the primary PCR reaction. For the primary PCR custom primers were used that were complementary to the sequences surrounding the genomic targets and had non-complementary ‘tails’ with Illumina adapter sequences (Table Ex. 12.1). Q5 HotStart 2× MasterMix (New England Biolabs) was used for the primary PCR and the reaction set up using 4 μL of cell lysate as template and 0.2 mM of each primer in a final volume of 25 μL. The cycling conditions used were: 98° C. for 2 min 30 s, 24 cycles of 98° C. for 30 s, 56.5° C. for 30 s, 72° C. for 25 s, and final extension at 72° C. for 2 min. The primary PCR product was purified using Monarch PCR & DNA Cleanup Kit (New England Biolabs) and used for the secondary PCR.

TABLE Ex. 12.1.
Custom primers used for primary PCR of genomic DNA deep sequencing sample preparation

| | Primer sequence 5′-3′. | |
|---|---|---|
| No. | Underlined sequences complementary to genomic DNA | Description |
| 1 | ACACTCTTTCCCTACACGACGCTCTTCCGATCTATTGAGTCCC | Indels Primary PCR RUNX1 forward |
| | CCGCCTTCAG (SEQ ID NO: 758) | primer |
| 2 | GTGACTGGAGTTCAGACGTGTGCTCTTCCGATCTATGAAGCA | Indels Primary PCR RUNX1 reverse |
| | CTGTGGGTACGA (SEQ ID NO: 759) | primer |
| 3 | ACACTCTTTCCCTACACGACGCTCTTCCGATCTcagTTCTCTGG | Indels Primary PCR SCN1A forward |
| | TGAAGAAGTTGAAGC (SEQ ID NO: 760) | primer |
| 4 | ACACTCTTTCCCTACACGACGCTCTTCCGATCTgTTCTCTGGT | Indels Primary PCR SCN1A forward |
| | GAAGAAGTTGAAGC (SEQ ID NO: 761) | primer |
| 5 | GTGACTGGAGTTCAGACGTGTGCTCTTCCGATCTGGAATTTC | Indels Primary PCR SCN1A reverse |
| | ATATGCAGAATAAATGG (SEQ ID NO: 762) | primer |
| 6 | GTGACTGGAGTTCAGACGTGTGCTCTTCCGATCTcctGGAATT | Indels Primary PCR SCN1A reverse |
| | TCATATGCAGAATAAATGG (SEQ ID NO: 763) | primer |
| 7 | ACACTCTTTCCCTACACGACGCTCTTCCGATCTTTGGTCAGGT | Indels Primary PCR DNMT1 forward |
| | TGGCTGCTGG (SEQ ID NO: 764) | primer |
| 8 | ACACTCTTTCCCTACACGACGCTCTTCCGATCTcgTTGGTCAG | Indels Primary PCR DNMT1 forward |
| | GTTGGCTGCTGG (SEQ ID NO: 765) | primer |
| 9 | GTGACTGGAGTTCAGACGTGTGCTCTTCCGATCTctAACACTC | Indels Primary PCR DNMT1 reverse |
| | CTCAAACGGTCCC (SEQ ID NO: 766) | primer |
| 10 | GTGACTGGAGTTCAGACGTGTGCTCTTCCGATCTAACACTCC | Indels Primary PCR DNMT1 reverse |
| | TCAAACGGTCCC (SEQ ID NO: 767) | primer |
| 11 | ACACTCTTTCCCTACACGACGCTCTTCCGATCTgccgaTACCTG | Indels Primary PCR FANCF site 1 |
| | CGCCACATCCATCG (SEQ ID NO: 768) | forward primer |
| 12 | ACACTCTTTCCCTACACGACGCTCTTCCGATCTacTACCTGCG | Indels Primary PCR FANCF site 1 |
| | CCACATCCATCG (SEQ ID NO: 769) | forward primer |
| 13 | GTGACTGGAGTTCAGACGTGTGCTCTTCCGATCTAAAGCCGC | Indels Primary PCR FANCF site 1 |
| | CCTCTTGCCTCC (SEQ ID NO: 770) | reverse primer |
| 14 | ACACTCTTTCCCTACACGACGCTCTTCCGATCTtgactTTCGAC | Indels Primary PCR FANCF site 2 |
| | CAATAGCATTGCAGAG (SEQ ID NO: 771) | forward primer |
| 15 | ACACTCTTTCCCTACACGACGCTCTTCCGATCTgactTTCGACC | Indels Primary PCR FANCF site 2 |
| | AATAGCATTGCAGAG (SEQ ID NO: 772) | forward primer |
| 16 | GTGACTGGAGTTCAGACGTGTGCTCTTCCGATCTctcctAAGG | Indels Primary PCR FANCF site 2 |
| | CCCTACTTCCGCTTTC (SEQ ID NO: 773) | reverse primer |
| 17 | GTGACTGGAGTTCAGACGTGTGCTCTTCCGATCTtgactAAGG | Indels Primary PCR FANCF site 2 |
| | CCCTACTTCCGCTTTC (SEQ ID NO: 774) | reverse primer |

[3246] Secondary PCR was performed using PCR Add-on Kit for Illumina (Lexogen) with primers encoding Illumina sequences and a 6nt i7 index (Lexogen i7 6 nt Index Set (7001-7096)) according to the manufacturer's instructions. Cycling conditions for secondary PCR were as follows: 98° C. for 30 s, 8 cycles at 98° C. for 10 s, 65° C. for 20 s and 72° C. for 30 s, followed by final extension at 72° C. for 1 min. The secondary PCR products were purified using Monarch PCR & DNA Cleanup Kit (New England Biolabs), their quantity and quality checked using spectrophotometry (NanoPhotometer® NP80, IMPLEN) and fluorimetry (Qubit 1×dsDNA HS Assay and Qubit 4, Thermo Fisher Scientific). The purified samples were pooled in an equimolar ratio and size selection performed using Ampure XP (Beckman Coulter) magnetic beads. The resulting library was analyzed using Bioanalyzer (Agilent) and quantified using NEBNext Library Quant Kit for Illumina (New England Biolabs). Final library pool was prepared for deep sequencing according to Illumina's specifications. Paired end sequencing was performed using the MiSeq Reagent Kit v2 (300-cycles) (Illumina) on the MiSeq System (Illumina) with 7% PhiX v.3 (Illumina). All sequencing data analysis was done using Geneious Prime 2023.0.4. Reads were trimmed and filtered using BBDuk and mapped to the reference sequence with quantification window set on each side of the predicted cleavage site. Reads that differed from the reference sequence in this window were included in genome editing efficiency calculations.

[3247] Efficiency results are presented in FIG. 22A and reads with the top 5 most common editing outcomes presented in FIG. 22B, with raw data presented in FIGS. 23A and 23B. Editing efficiency of ID405, ID414 and ID418 was comparable to that of LbaCas12a over five genomic targets in DNMT1, FANCF, RUNX1 and SCN1A genes. For DNMT1, SCN1A, RUNX1 and FANCF site 2 targets ID405 exhibited best genome editing efficiency up to 56% of edited reads, even exceeding LbaCas12a in the case of SCN1A and DNMT1 targets. ID414 and ID418 produced editing efficiencies up to 34% and 17% respectively. The majority of edited reads have small deletions in the editing window.

[3248] Efficiency results for proteins that recognize CTC PAM are presented in FIG. 24 and reads with the top 5 most common editing outcomes of active proteins presented in FIG. 25. Editing efficiency of ID428 and ID433 is low (<1%) but elevated count of mutant reads can be detected with deep sequencing when compared to negative control, which suggests weak nuclease activity in eukaryotic cells. Sequences used in this example are provided in Tables Ex. 12.2-Ex. 12.5.

TABLE Ex. 12.1.
Custom primers used for primary PCR of genomic
DNA deep sequencing sample preparation

| | Primer sequence 5′-3′. | |
|---|---|---|
| No. | Underlined sequences complementary to genomic DNA | Description |
| 1 | ACACTCTTTCCCTACACGACGCTCTTCCGATCTCCTGGATCGC | Indels Primary PCR FANCF site 2 |
| | TTTTCCGAGCT (SEQ ID NO: 775) | forward primer |
| 2 | GTGACTGGAGTTCAGACGTGTGCTCTTCCGATCTAGGTAGC | Indels Primary PCR FANCF site 2 |
| | GCGCCCACTGCAA (SEQ ID NO: 776) | reverse primer |
| 3 | ACACTCTTTCCCTACACGACGCTCTTCCGATCTGCAATGCGTC | Indels Primary SCN1A site 1 forward |
| | TTTCAATAGCCGC (SEQ ID NO: 777) | primer |
| 4 | GTGACTGGAGTTCAGACGTGTGCTCTTCCGATCTtAAAATGT | Indels Primary SCN1A site 1 reverse |
| | GCAGGATGACAAGATG (SEQ ID NO: 778) | primer |
| 5 | ACACTCTTTCCCTACACGACGCTCTTCCGATCTAGGTCCTGGT | Indels Primary SCN1A site 2 forward |
| | GGTACAAGCACT (SEQ ID NO: 779) | primer |
| 6 | GTGACTGGAGTTCAGACGTGTGCTCTTCCGATCTTCCACTCT | Indels Primary SCN1A site 2 reverse |
| | TTAAAATATCTGTATTCC (SEQ ID NO: 780) | primer |
| 7 | ACACTCTTTCCCTACACGACGCTCTTCCGATCTGTTTCCCTCA | Indels Primary DNMT1 site 2 forward |
| | CTCCTGCTCG (SEQ ID NO: 781) | primer |
| 8 | GTGACTGGAGTTCAGACGTGTGCTCTTCCGATCTCTCCTCAA | Indels Primary DNMT1 site 2 reverse |
| | ACGGTCCCCAGA (SEQ ID NO: 782) | primer |
| 9 | ACACTCTTTCCCTACACGACGCTCTTCCGATCTGTACATGTG | Indels Primary DNMT1 site 3 forward |
| | GGGGCAGTTGC (SEQ ID NO: 783) | primer |
| 10 | GTGACTGGAGTTCAGACGTGTGCTCTTCCGATCTACGTGCAA | Indels Primary DNMT1 site 3 reverse |
| | CTCACTCAATCCT (SEQ ID NO: 784) | primer |
| 11 | ACACTCTTTCCCTACACGACGCTCTTCCGATCTGTACATGTGG | Indels Primary DNMT1 site 3 forward |
| | GGGCAGTTGC (SEQ ID NO: 785) | primer |
| 12 | GTGACTGGAGTTCAGACGTGTGCTCTTCCGATCTCACGTGCA | Indels Primary DNMT1 site 3 reverse |
| | ACTCACTCAATCCT (SEQ ID NO: 786) | primer |

TABLE Ex. 12.3.
Target sequences in HEK293T cells in Example 12

| Cas12a | | | |
|---|---|---|---|
| nuclease | Target | Target sequence | PAM |
| ID409 | DNMT1 site 2 | AGCAGGCACCTGCCTCAGCTGCT | CTC |
| | | (SEQ ID NO: 787) | |
| ID409 | DNMT1 site 3 | AGGCGGGTCACCTACCCACGTTC | CTC |
| | | (SEQ ID NO: 788) | |
| ID428 | DNMT1 site 3 | AGGCGGGTCACCTACCCACGTTC | CTC |
| | | (SEQ ID NO: 788) | |
| ID428 | DNMT1 site 2 | AGCAGGCACCTGCCTCAGCTGCT | CTC |
| | | (SEQ ID NO: 787) | |
| ID433 | DNMT1 site 2 | AGCAGGCACCTGCCTCAGCTGCT | CTC |
| | | (SEQ ID NO: 787) | |
| ID433 | DNMT1 site 3 | AGGCGGGTCACCTACCCACGTTC | CTC |
| | | (SEQ ID NO: 788) | |
| ID409 | SCN1A_T1 | TGGTGAAGAAGTTGAAGCTGTCA | CTC |
| | | (SEQ ID NO: 789) | |
| ID409 | SCN1A_T2 | CATCTTGTCATCCTGCACATTTT | CTC |
| | | (SEQ ID NO: 790) | |
| ID428 | SCN1A_T1 | TGGTGAAGAAGTTGAAGCTGTCA | CTC |
| | | (SEQ ID NO: 789) | |
| ID428 | SCN1A_T2 | CATCTTGTCATCCTGCACATTTT | CTC |
| | | (SEQ ID NO: 790) | |
| ID433 | SCN1A_T1 | TGGTGAAGAAGTTGAAGCTGTCA | CTC |
| | | (SEQ ID NO: 789) | |
| ID433 | SCN1A_T2 | CATCTTGTCATCCTGCACATTTT | CTC |
| | | (SEQ ID NO: 790) | |
| ID409 | FANCF site 2 | AAGCACTACCTACGTCAGCACCT | CTC |
| | | (SEQ ID NO: 791) | |
| ID428 | FANCF site 2 | AAGCACTACCTACGTCAGCACCT | CTC |
| | | (SEQ ID NO: 791) | |
| ID433 | FANCF site 2 | AAGCACTACCTACGTCAGCACCT | CTC |
| | | (SEQ ID NO: 791) | |

TABLE Ex. 12.4.
crRNA sequences used in Example 12

| Cas12a | | |
|---|---|---|
| nuclease | Target | crRNA sequence |
| ID409 | DNMT1 | UAAAUUUCUACUAUUGUAGAUAGCAGGCA |
| | site 2 | CCUGCCUCAGCUGCU |
| | | (SEQ ID NO: 792) |
| ID409 | DNMT1 | UAAAUUUCUACUAUUGUAGAUAGGCGGGU |
| | site 3 | CACCUACCCACGUUC |
| | | (SEQ ID NO: 793) |
| ID428 | DNMT1 | UAAAUUUCUACUAUUGUAGAUAGGCGGGU |
| | site 3 | CACCUACCCACGUUC |
| | | (SEQ ID NO: 793) |
| ID428 | DNMT1 | UAAAUUUCUACUAUUGUAGAUAGCAGGCA |
| | site 2 | CCUGCCUCAGCUGCU |
| | | (SEQ ID NO: 792) |
| ID433 | DNMT1 | AAAAUUUCUGCUAUUGCAGAUAGCAGGCA |
| | site 2 | CCUGCCUCAGCUGCU |
| | | (SEQ ID NO: 794) |
| ID433 | DNMT1 | AAAAUUUCUGCUAUUGCAGAUAGGCGGGU |
| | site 3 | CACCUACCCACGUUC |
| | | (SEQ ID NO: 795) |
| ID409 | SCN1A | UAAAUUUCUACUAUUGUAGAUUGGUGAAG |
| | site 1 | AAGUUGAAGCUGUCA |
| | | (SEQ ID NO: 796) |
| ID409 | SCN1A | UAAAUUUCUACUAUUGUAGAUCAUCUUGU |
| | site 2 | CAUCCUGCACAUUUU |
| | | (SEQ ID NO: 797) |
| ID428 | SCN1A | UAAAUUUCUACUAUUGUAGAUUGGUGAAG |
| | site 1 | AAGUUGAAGCUGUCA |
| | | (SEQ ID NO: 796) |
| ID428 | SCN1A | UAAAUUUCUACUAUUGUAGAUCAUCUUGU |
| | site 2 | CAUCCUGCACAUUUU |
| | | (SEQ ID NO: 797) |
| ID433 | SCN1A | AAAAUUUCUGCUAUUGCAGAUUGGUGAAG |
| | site 1 | AAGUUGAAGCUGUCA |
| | | (SEQ ID NO: 798) |
| ID433 | SCN1A | AAAAUUUCUGCUAUUGCAGAUCAUCUUGU |
| | site 2 | CAUCCUGCACAUUUU |
| | | (SEQ ID NO: 799) |
| ID409 | FANCF | UAAAUUUCUACUAUUGUAGAUAAGCACUA |
| | site 2 | CCUACGUCAGCACCU |
| | | (SEQ ID NO: 800) |
| ID428 | FANCF | UAAAUUUCUACUAUUGUAGAUAAGCACUA |
| | site 2 | CCUACGUCAGCACCU |
| | | (SEQ ID NO: 800) |
| ID433 | FANCF | AAAAUUUCUGCUAUUGCAGAUAAGCACUA |
| | site 2 | CCUACGUCAGCACCU |
| | | (SEQ ID NO: 801) |

TABLE Ex. 12.5.
Full cassette sequences used in Example 12

| Cas12a | | |
|---|---|---|
| nuclease | Target | Full cassette sequence |
| ID409 | DNMT1 | AAGGTCGGGCAGGAAGAGGGCCTATTTCCCATGATTCCTTCATATTTGCATATACGA |
| | site 2 | TACAAGGCTGTTAGAGAGATAATTAGAATTAATTTGACTGTAAACACAAAGATATTA |
| | | GTACAAAATACGTGACGTAGAAAGTAATAATTTCTTGGGTAGTTTGCAGTTTTAAAA |
| | | TTATGTTTTAAAATGGACTATCATATGCTTACCGTAACTTGAAAGTATTTCGATTTCT |
| | | TGGCTTTATATATCTTGTGGAAAGGACGAAACACCTAAATTTCTACTATTGTAGATA |
| | | GCAGGCACCTGCCTCAGCTGCTGGCCGGCATGGTCCCAGCCTCCTCGCTGGCGCCG |
| | | GCTGGGCAACATGCTTCGGCATGGCGAATGGGAC (SEQ ID NO: 802) |
| ID409 | DNMT1 | AAGGTCGGGCAGGAAGAGGGCCTATTTCCCATGATTCCTTCATATTTGCATATACGA |
| | site 3 | TACAAGGCTGTTAGAGAGATAATTAGAATTAATTTGACTGTAAACACAAAGATATTA |
| | | GTACAAAATACGTGACGTAGAAAGTAATAATTTCTTGGGTAGTTTGCAGTTTTAAAA |
| | | TTATGTTTTAAAATGGACTATCATATGCTTACCGTAACTTGAAAGTATTTCGATTTCT |
| | | TGGCTTTATATATCTTGTGGAAAGGACGAAACACCTAAATTTCTACTATTGTAGATA |
| | | GGCGGGTCACCTACCCACGTTCGGCCGGCATGGTCCCAGCCTCCTCGCTGGCGCCG |
| | | GCTGGGCAACATGCTTCGGCATGGCGAATGGGAC (SEQ ID NO: 803) |
| ID428 | DNMT1 | AAGGTCGGGCAGGAAGAGGGCCTATTTCCCATGATTCCTTCATATTTGCATATACGA |
| | site 3 | TACAAGGCTGTTAGAGAGATAATTAGAATTAATTTGACTGTAAACACAAAGATATTA |
| | | GTACAAAATACGTGACGTAGAAAGTAATAATTTCTTGGGTAGTTTGCAGTTTTAAAA |
| | | TTATGTTTTAAAATGGACTATCATATGCTTACCGTAACTTGAAAGTATTTCGATTTCT |
| | | TGGCTTTATATATCTTGTGGAAAGGACGAAACACCTAAATTTCTACTATTGTAGATA |
| | | GGCGGGTCACCTACCCACGTTCGGCCGGCATGGTCCCAGCCTCCTCGCTGGCGCCG |
| | | GCTGGGCAACATGCTTCGGCATGGCGAATGGGAC (SEQ ID NO: 803) |
| ID428 | DNMT1 | AAGGTCGGGCAGGAAGAGGGCCTATTTCCCATGATTCCTTCATATTTGCATATACGA |
| | site 2 | TACAAGGCTGTTAGAGAGATAATTAGAATTAATTTGACTGTAAACACAAAGATATTA |
| | | GTACAAAATACGTGACGTAGAAAGTAATAATTTCTTGGGTAGTTTGCAGTTTTAAAA |
| | | TTATGTTTTAAAATGGACTATCATATGCTTACCGTAACTTGAAAGTATTTCGATTTCT |
| | | TGGCTTTATATATCTTGTGGAAAGGACGAAACACCTAAATTTCTACTATTGTAGATA |
| | | GCAGGCACCTGCCTCAGCTGCTGGCCGGCATGGTCCCAGCCTCCTCGCTGGCGCCG |
| | | GCTGGGCAACATGCTTCGGCATGGCGAATGGGAC (SEQ ID NO: 802) |
| ID433 | DNMT1 | AAGGTCGGGCAGGAAGAGGGCCTATTTCCCATGATTCCTTCATATTTGCATATACGA |
| | site 2 | TACAAGGCTGTTAGAGAGATAATTAGAATTAATTTGACTGTAAACACAAAGATATTA |
| | | GTACAAAATACGTGACGTAGAAAGTAATAATTTCTTGGGTAGTTTGCAGTTTTAAAA |
| | | TTATGTTTTAAAATGGACTATCATATGCTTACCGTAACTTGAAAGTATTTCGATTTCT |
| | | TGGCTTTATATATCTTGTGGAAAGGACGAAACACCAAAATTTCTGCTATTGCAGATA |
| | | GCAGGCACCTGCCTCAGCTGCTGGCCGGCATGGTCCCAGCCTCCTCGCTGGCGCCG |
| | | GCTGGGCAACATGCTTCGGCATGGCGAATGGGAC (SEQ ID NO: 804) |
| ID433 | DNMT1 | AAGGTCGGGCAGGAAGAGGGCCTATTTCCCATGATTCCTTCATATTTGCATATACGA |
| | site 3 | TACAAGGCTGTTAGAGAGATAATTAGAATTAATTTGACTGTAAACACAAAGATATTA |
| | | GTACAAAATACGTGACGTAGAAAGTAATAATTTCTTGGGTAGTTTGCAGTTTTAAAA |
| | | TTATGTTTTAAAATGGACTATCATATGCTTACCGTAACTTGAAAGTATTTCGATTTCT |
| | | TGGCTTTATATATCTTGTGGAAAGGACGAAACACCAAAATTTCTGCTATTGCAGATA |
| | | GGCGGGTCACCTACCCACGTTCGGCCGGCATGGTCCCAGCCTCCTCGCTGGCGCCG |
| | | GCTGGGCAACATGCTTCGGCATGGCGAATGGGAC (SEQ ID NO: 805) |
| ID409 | SCN1A | AAGGTCGGGCAGGAAGAGGGCCTATTTCCCATGATTCCTTCATATTTGCATATACGA |
| | site 1 | TACAAGGCTGTTAGAGAGATAATTAGAATTAATTTGACTGTAAACACAAAGATATTA |
| | | GTACAAAATACGTGACGTAGAAAGTAATAATTTCTTGGGTAGTTTGCAGTTTTAAAA |
| | | TTATGTTTTAAAATGGACTATCATATGCTTACCGTAACTTGAAAGTATTTCGATTTCT |
| | | TGGCTTTATATATCTTGTGGAAAGGACGAAACACCTAAATTTCTACTATTGTAGATT |
| | | GGTGAAGAAGTTGAAGCTGTCAGGCCGGCATGGTCCCAGCCTCCTCGCTGGCGCC |
| | | GGCTGGGCAACATGCTTCGGCATGGCGAATGGGAC (SEQ ID NO: 806) |
| ID409 | SCN1A | AAGGTCGGGCAGGAAGAGGGCCTATTTCCCATGATTCCTTCATATTTGCATATACGA |
| | site 2 | TACAAGGCTGTTAGAGAGATAATTAGAATTAATTTGACTGTAAACACAAAGATATTA |
| | | GTACAAAATACGTGACGTAGAAAGTAATAATTTCTTGGGTAGTTTGCAGTTTTAAAA |
| | | TTATGTTTTAAAATGGACTATCATATGCTTACCGTAACTTGAAAGTATTTCGATTTCT |
| | | TGGCTTTATATATCTTGTGGAAAGGACGAAACACCTAAATTTCTACTATTGTAGATC |
| | | ATCTTGTCATCCTGCACATTTTGGCCGGCATGGTCCCAGCCTCCTCGCTGGCGCCGG |
| | | CTGGGCAACATGCTTCGGCATGGCGAATGGGAC (SEQ ID NO: 807) |
| ID428 | SCN1A | AAGGTCGGGCAGGAAGAGGGCCTATTTCCCATGATTCCTTCATATTTGCATATACGA |
| | site 1 | TACAAGGCTGTTAGAGAGATAATTAGAATTAATTTGACTGTAAACACAAAGATATTA |
| | | GTACAAAATACGTGACGTAGAAAGTAATAATTTCTTGGGTAGTTTGCAGTTTTAAAA |
| | | TTATGTTTTAAAATGGACTATCATATGCTTACCGTAACTTGAAAGTATTTCGATTTCT |
| | | TGGCTTTATATATCTTGTGGAAAGGACGAAACACCTAAATTTCTACTATTGTAGATT |
| | | GGTGAAGAAGTTGAAGCTGTCAGGCCGGCATGGTCCCAGCCTCCTCGCTGGCGCC |
| | | GGCTGGGCAACATGCTTCGGCATGGCGAATGGGAC (SEQ ID NO: 806) |
| ID428 | SCN1A | AAGGTCGGGCAGGAAGAGGGCCTATTTCCCATGATTCCTTCATATTTGCATATACGA |
| | site 2 | TACAAGGCTGTTAGAGAGATAATTAGAATTAATTTGACTGTAAACACAAAGATATTA |
| | | GTACAAAATACGTGACGTAGAAAGTAATAATTTCTTGGGTAGTTTGCAGTTTTAAAA |
| | | TTATGTTTTAAAATGGACTATCATATGCTTACCGTAACTTGAAAGTATTTCGATTTCT |
| | | TGGCTTTATATATCTTGTGGAAAGGACGAAACACCTAAATTTCTACTATTGTAGATC |
| | | ATCTTGTCATCCTGCACATTTTGGCCGGCATGGTCCCAGCCTCCTCGCTGGCGCCGG |
| | | CTGGGCAACATGCTTCGGCATGGCGAATGGGAC (SEQ ID NO: 807) |
| ID433 | SCN1A | AAGGTCGGGCAGGAAGAGGGCCTATTTCCCATGATTCCTTCATATTTGCATATACGA |
| | site 1 | TACAAGGCTGTTAGAGAGATAATTAGAATTAATTTGACTGTAAACACAAAGATATTA |
| | | GTACAAAATACGTGACGTAGAAAGTAATAATTTCTTGGGTAGTTTGCAGTTTTAAAA |
| | | TTATGTTTTAAAATGGACTATCATATGCTTACCGTAACTTGAAAGTATTTCGATTTCT |
| | | TGGCTTTATATATCTTGTGGAAAGGACGAAACACCAAAATTTCTGCTATTGCAGATT |
| | | GGTGAAGAAGTTGAAGCTGTCAGGCCGGCATGGTCCCAGCCTCCTCGCTGGCGCC |
| | | GGCTGGGCAACATGCTTCGGCATGGCGAATGGGAC (SEQ ID NO: 808) |
| ID433 | SCN1A | AAGGTCGGGCAGGAAGAGGGCCTATTTCCCATGATTCCTTCATATTTGCATATACGA |
| | site 2 | TACAAGGCTGTTAGAGAGATAATTAGAATTAATTTGACTGTAAACACAAAGATATTA |
| | | GTACAAAATACGTGACGTAGAAAGTAATAATTTCTTGGGTAGTTTGCAGTTTTAAAA |
| | | TTATGTTTTAAAATGGACTATCATATGCTTACCGTAACTTGAAAGTATTTCGATTTCT |
| | | TGGCTTTATATATCTTGTGGAAAGGACGAAACACCAAAATTTCTGCTATTGCAGATC |
| | | ATCTTGTCATCCTGCACATTTTGGCCGGCATGGTCCCAGCCTCCTCGCTGGCGCCGG |
| | | CTGGGCAACATGCTTCGGCATGGCGAATGGGAC (SEQ ID NO: 809) |
| ID409 | FANCF | AAGGTCGGGCAGGAAGAGGGCCTATTTCCCATGATTCCTTCATATTTGCATATACGA |
| | site 2 | TACAAGGCTGTTAGAGAGATAATTAGAATTAATTTGACTGTAAACACAAAGATATTA |
| | | GTACAAAATACGTGACGTAGAAAGTAATAATTTCTTGGGTAGTTTGCAGTTTTAAAA |
| | | TTATGTTTTAAAATGGACTATCATATGCTTACCGTAACTTGAAAGTATTTCGATTTCT |
| | | TGGCTTTATATATCTTGTGGAAAGGACGAAACACCTAAATTTCTACTATTGTAGATA |
| | | AGCACTACCTACGTCAGCACCTGGCCGGCATGGTCCCAGCCTCCTCGCTGGCGCCG |
| | | GCTGGGCAACATGCTTCGGCATGGCGAATGGGAC (SEQ ID NO: 810) |
| ID428 | FANCF | AAGGTCGGGCAGGAAGAGGGCCTATTTCCCATGATTCCTTCATATTTGCATATACGA |
| | site 2 | TACAAGGCTGTTAGAGAGATAATTAGAATTAATTTGACTGTAAACACAAAGATATTA |
| | | GTACAAAATACGTGACGTAGAAAGTAATAATTTCTTGGGTAGTTTGCAGTTTTAAAA |
| | | TTATGTTTTAAAATGGACTATCATATGCTTACCGTAACTTGAAAGTATTTCGATTTCT |
| | | TGGCTTTATATATCTTGTGGAAAGGACGAAACACCTAAATTTCTACTATTGTAGATA |
| | | AGCACTACCTACGTCAGCACCTGGCCGGCATGGTCCCAGCCTCCTCGCTGGCGCCG |
| | | GCTGGGCAACATGCTTCGGCATGGCGAATGGGAC (SEQ ID NO: 810) |
| ID433 | FANCF | AAGGTCGGGCAGGAAGAGGGCCTATTTCCCATGATTCCTTCATATTTGCATATACGA |
| | site 2 | TACAAGGCTGTTAGAGAGATAATTAGAATTAATTTGACTGTAAACACAAAGATATTA |
| | | GTACAAAATACGTGACGTAGAAAGTAATAATTTCTTGGGTAGTTTGCAGTTTTAAAA |
| | | TTATGTTTTAAAATGGACTATCATATGCTTACCGTAACTTGAAAGTATTTCGATTTCT |
| | | TGGCTTTATATATCTTGTGGAAAGGACGAAACACCAAAATTTCTGCTATTGCAGATA |
| | | AGCACTACCTACGTCAGCACCTGGCCGGCATGGTCCCAGCCTCCTCGCTGGCGCCG |
| | | GCTGGGCAACATGCTTCGGCATGGCGAATGGGAC (SEQ ID NO: 811) |

### Supplementary Sequences for Examples

TABLE S1
crRNA for PAM determination:

| Cas12a | crRNA sequence (mature repeat)-against T7 |
|---|---|
| nuclease | endo library for PAM determination |
| LbaCas12a | UAAUUUCUACUAAGUGUAGAUUGUCCUCUUCCUCUUUAGCG |
| | (SEQ ID NO: 812) |
| ID400 | GGAAUUUCUACUGUUGUAGAUUGUCCUCUUCCUCUUUAGCG |
| | (SEQ ID NO: 813) |
| ID401 | AGAAUUUCUACUGUUGUAGAUUGUCCUCUUCCUCUUUAGCG |
| | (SEQ ID NO: 814) |
| ID402 | AAAAUUUCUACUCUUGUAGAUUGUCCUCUUCCUCUUUAGCG |
| | (SEQ ID NO: 815) |
| ID403 | AAAAUUUCUACUAUUGUAGAUUGUCCUCUUCCUCUUUAGCG |
| | (SEQ ID NO: 816) |
| ID404 | AAAAUUUCUACUCUUGUAGAUUGUCCUCUUCCUCUUUAGCG |
| | (SEQ ID NO: 815) |
| ID405 | UGAAUUUCUACUGUUGUAGAUUGUCCUCUUCCUCUUUAGCG |
| | (SEQ ID NO: 817) |
| ID406 | UAAAUUUCUACUGUUGUAGAUUGUCCUCUUCCUCUUUAGCG |
| | (SEQ ID NO: 818) |
| ID407 | AAAAUUUCUACUAUUGUAGAUUGUCCUCUUCCUCUUUAGCG |
| | (SEQ ID NO: 816) |
| ID408 | AAAAUUUCUGCUAUUGCAGAUUGUCCUCUUCCUCUUUAGCG |
| | (SEQ ID NO: 819) |
| ID409 | UAAAUUUCUACUAUUGUAGAUUGUCCUCUUCCUCUUUAGCG |
| | (SEQ ID NO: 820) |
| ID410 | AUAAUUUCUACUAUCGUAGAUUGUCCUCUUCCUCUUUAGCG |
| | (SEQ ID NO: 821) |
| ID411 | UAAAUUUCUACUGUUGUAGAUUGUCCUCUUCCUCUUUAGCG |
| | (SEQ ID NO: 818) |
| ID412 | UUAAUUUCUACUAUUGUAGAUUGUCCUCUUCCUCUUUAGCG |
| | (SEQ ID NO: 822) |
| ID413 | AUAAUUUCUACUAUUGUAGAUUGUCCUCUUCCUCUUUAGCG |
| | (SEQ ID NO: 823) |
| ID414 | AUAAUUUCUACUGUUGUAGAUUGUCCUCUUCCUCUUUAGCG |
| | (SEQ ID NO: 824) |
| ID415 | UUAAUUUCUACUCUCGUAGAUUGUCCUCUUCCUCUUUAGCG |
| | (SEQ ID NO: 825) |
| ID416 | AUAAUUUCUACUAUCGUAGAUUGUCCUCUUCCUCUUUAGCG |
| | (SEQ ID NO: 821) |
| ID417 | UAAAUUUCUACUGUUGUAGAUUGUCCUCUUCCUCUUUAGCG |
| | (SEQ ID NO: 818) |
| ID418 | UAAAUUUCUACUAUUGUAGAUUGUCCUCUUCCUCUUUAGCG |
| | (SEQ ID NO: 820) |
| ID419 | AGAAUUUCUACUGUUGUAGAUUGUCCUCUUCCUCUUUAGCG |
| | (SEQ ID NO: 814) |
| ID420 | AUAAUUUCUACUAUUGUAGAUUGUCCUCUUCCUCUUUAGCG |
| | (SEQ ID NO: 823) |
| ID421 | AUAAUUUCUACUAUUGUAGAUUGUCCUCUUCCUCUUUAGCG |
| | (SEQ ID NO: 823) |
| ID422 | AAAAUUUCUACUAUUGUAGAUUGUCCUCUUCCUCUUUAGCG |
| | (SEQ ID NO: 816) |
| ID423 | GAAAUUUCUACUAUCGUAGAUUGUCCUCUUCCUCUUUAGCG |
| | (SEQ ID NO: 826) |
| ID424 | AUAAUUUCUACUAUUGUAGAUUGUCCUCUUCCUCUUUAGCG |
| | (SEQ ID NO: 823) |
| ID425 | UAAAUUUCUACUAUUGUAGAUUGUCCUCUUCCUCUUUAGCG |
| | (SEQ ID NO: 820) |
| ID426 | UCAAUUUCUACUGUUGUAGAUUGUCCUCUUCCUCUUUAGCG |
| | (SEQ ID NO: 827) |
| ID427 | AAAAUUUCUACUAUUGUAGAUUGUCCUCUUCCUCUUUAGCG |
| | (SEQ ID NO: 816) |
| ID428 | UAAAUUUCUACUAUUGUAGAUUGUCCUCUUCCUCUUUAGCG |
| | (SEQ ID NO: 820) |
| ID429 | AUAAUUUCUACUGUUGUAGAUUGUCCUCUUCCUCUUUAGCG |
| | (SEQ ID NO: 824) |
| ID430 | AGAAUUUCUACUUAUGUAGAUUGUCCUCUUCCUCUUUAGCG |
| | (SEQ ID NO: 828) |
| ID431 | UCAAUUUCUACUUUUGUAGAUUGUCCUCUUCCUCUUUAGCG |
| | (SEQ ID NO: 829) |
| ID432 | AUAAUUUCUACUGUUGUAGAUUGUCCUCUUCCUCUUUAGCG |
| | (SEQ ID NO: 824) |
| ID433 | AAAAUUUCUGCUAUUGCAGAUUGUCCUCUUCCUCUUUAGCG |
| | (SEQ ID NO: 819) |

TABLE S2
Target sequences HEK293T

| Cas12a | | | |
|---|---|---|---|
| nuclease | Target | Target sequence | PAM |
| LbaCas12a | DNMT1 | CCTCACTCCTGCTCGGTGAATTT | TTTC |
| | | (SEQ ID NO: 830) | |
| ID401 | DNMT1 | CCTCACTCCTGCTCGGTGAATTT | TTTC |
| | | (SEQ ID NO: 830) | |
| ID402 | DNMT1 | CCTCACTCCTGCTCGGTGAATTT | TTTC |
| | | (SEQ ID NO: 830) | |
| ID403 | DNMT1 | CCTCACTCCTGCTCGGTGAATTT | TTTC |
| | | (SEQ ID NO: 830) | |
| ID404 | DNMT1 | CCTCACTCCTGCTCGGTGAATTT | TTTC |
| | | (SEQ ID NO: 830) | |
| ID405 | DNMT1 | CCTCACTCCTGCTCGGTGAATTT | TTTC |
| | | (SEQ ID NO: 830) | |
| ID406 | DNMT1 | CCTCACTCCTGCTCGGTGAATTT | TTTC |
| | | (SEQ ID NO: 830) | |
| ID407 | DNMT1 | CCTCACTCCTGCTCGGTGAATTT | TTTC |
| | | (SEQ ID NO: 830) | |
| ID408 | DNMT1 | CCTCACTCCTGCTCGGTGAATTT | TTTC |
| | | (SEQ ID NO: 830) | |
| ID409 | DNMT1_T1 | TGGGACTCAGGCGGGTCACCTAC | CTC |
| | | (SEQ ID NO: 831) | |
| ID409 | DNMT1_T2 | AGCAGGCACCTGCCTCAGCTGCT | CTC |
| | | (SEQ ID NO: 787) | |
| ID409 | DNMT1_T3 | AGGCGGGTCACCTACCCACGTTC | CTC |
| | | (SEQ ID NO: 788) | |
| ID409 | DNMT1_T4 | ACTCCTGCTCGGTGAATTTGGCT | CTC |
| | | (SEQ ID NO: 832) | |
| ID410 | DNMT1 | CCTCACTCCTGCTCGGTGAATTT | TTTC |
| | | (SEQ ID NO: 830) | |
| ID411 | DNMT1 | CCTCACTCCTGCTCGGTGAATTT | TTTC |
| | | (SEQ ID NO: 830) | |
| ID412 | DNMT1 | CCTCACTCCTGCTCGGTGAATTT | TTTC |
| | | (SEQ ID NO: 830) | |
| ID413 | DNMT1 | CCTCACTCCTGCTCGGTGAATTT | TTTC |
| | | (SEQ ID NO: 830) | |
| ID414 | DNMT1 | CCTCACTCCTGCTCGGTGAATTT | TTTC |
| | | (SEQ ID NO: 830) | |
| ID415 | DNMT1 | CCTCACTCCTGCTCGGTGAATTT | TTTC |
| | | (SEQ ID NO: 830) | |
| ID416 | DNMT1_T1 | GGCTCTGGGACTCAGGCGGGTCA | TTTTG |
| | | (SEQ ID NO: 833) | |
| ID416 | DNMT1_T2 | GCTCAGCAGGCACCTGCCTCAGC | ATTTG |
| | | (SEQ ID NO: 834) | |
| ID417 | DNMT1 | CCTCACTCCTGCTCGGTGAATTT | TTTC |
| | | (SEQ ID NO: 830) | |
| ID418 | DNMT1 | CCTCACTCCTGCTCGGTGAATTT | TTTC |
| | | (SEQ ID NO: 830) | |
| ID419 | DNMT1 | CCTCACTCCTGCTCGGTGAATTT | TTTC |
| | | (SEQ ID NO: 830) | |
| ID420 | DNMT1 | CCTCACTCCTGCTCGGTGAATTT | TTTC |
| | | (SEQ ID NO: 830) | |
| ID421 | DNMT1 | CCTCACTCCTGCTCGGTGAATTT | TTTC |
| | | (SEQ ID NO: 830) | |
| ID422 | DNMT1 | CCTCACTCCTGCTCGGTGAATTT | TTTC |
| | | (SEQ ID NO: 830) | |
| ID423 | DNMT1_T1 | CCTCACTCCTGCTCGGTGAATTT | GTTTC |
| | | (SEQ ID NO: 830) | |
| ID423 | DNMT1_T2 | CTGATGGTCCATGTCTGTTACTC | GTTTC |
| | | (SEQ ID NO: 835) | |
| ID424 | DNMT1 | ACCGAGCAGGAGTGAGGGAAACG | ATTC |
| | | (SEQ ID NO: 836) | |
| ID425 | DNMT1 | CCTCACTCCTGCTCGGTGAATTT | TTTC |
| | | (SEQ ID NO: 830) | |
| ID426 | DNMT1 | CCTCACTCCTGCTCGGTGAATTT | TTTC |
| | | (SEQ ID NO: 830) | |
| ID427 | DNMT1 | CCTCACTCCTGCTCGGTGAATTT | TTTC |
| | | (SEQ ID NO: 830) | |
| ID428 | DNMT1_T1 | TGGGACTCAGGCGGGTCACCTAC | CTC |
| | | (SEQ ID NO: 831) | |
| ID428 | DNMT1_T2 | AGGCGGGTCACCTACCCACGTTC | CTC |
| | | (SEQ ID NO: 788) | |
| ID428 | DNMT1_T3 | AGCAGGCACCTGCCTCAGCTGCT | CTC |
| | | (SEQ ID NO: 787) | |
| ID428 | DNMT1_T4 | ACTCCTGCTCGGTGAATTTGGCT | CTC |
| | | (SEQ ID NO: 832) | |
| ID429 | DNMT1 | CCTCACTCCTGCTCGGTGAATTT | TTTC |
| | | (SEQ ID NO: 830) | |
| ID432 | DNMT1 | CCTCACTCCTGCTCGGTGAATTT | TTTC |
| | | (SEQ ID NO: 830) | |
| ID433 | DNMT1_T1 | ACTCCTGCTCGGTGAATTTGGCT | CTC |
| | | (SEQ ID NO: 832) | |
| ID433 | DNMT1_T2 | AGCAGGCACCTGCCTCAGCTGCT | CTC |
| | | (SEQ ID NO: 787) | |
| ID433 | DNMT1_T3 | AGGCGGGTCACCTACCCACGTTC | CTC |
| | | (SEQ ID NO: 788) | |
| LbaCas12a | RUNX1 | CAGGAGGAAGCGATGGCTTCAG | TTTT |
| | | (SEQ ID NO: 837) | |
| ID401 | RUNX1 | CAGGAGGAAGCGATGGCTTCAG | TTTT |
| | | (SEQ ID NO: 837) | |
| ID402 | RUNX1 | CAGGAGGAAGCGATGGCTTCAG | TTTT |
| | | (SEQ ID NO: 837) | |
| ID403 | RUNX1 | CAGGAGGAAGCGATGGCTTCAG | TTTT |
| | | (SEQ ID NO: 837) | |
| ID404 | RUNX1 | CAGGAGGAAGCGATGGCTTCAG | TTTT |
| | | (SEQ ID NO: 837) | |
| ID405 | RUNX1 | CAGGAGGAAGCGATGGCTTCAG | TTTT |
| | | (SEQ ID NO: 837) | |
| ID406 | RUNX1 | CAGGAGGAAGCGATGGCTTCAG | TTTT |
| | | (SEQ ID NO: 837) | |
| ID407 | RUNX1 | CAGGAGGAAGCGATGGCTTCAG | TTTT |
| | | (SEQ ID NO: 837) | |
| ID408 | RUNX1 | CAGGAGGAAGCGATGGCTTCAG | TTTT |
| | | (SEQ ID NO: 837) | |
| ID409 | RUNX1_T1 | AGCTTTGCCTGTAATGAAATGGC | CTC |
| | | (SEQ ID NO: 838) | |
| ID409 | RUNX1_T2 | GGTGCAGAGATGCCTCGGTGCCT | CTC |
| | | (SEQ ID NO: 839) | |
| ID410 | RUNX1 | CAGGAGGAAGCGATGGCTTCAG | TTTT |
| | | (SEQ ID NO: 837) | |
| ID411 | RUNX1 | CAGGAGGAAGCGATGGCTTCAG | TTTT |
| | | (SEQ ID NO: 837) | |
| ID412 | RUNX1 | CAGGAGGAAGCGATGGCTTCAG | TTTT |
| | | (SEQ ID NO: 837) | |
| ID413 | RUNX1 | CAGGAGGAAGCGATGGCTTCAG | TTTT |
| | | (SEQ ID NO: 837) | |
| ID414 | RUNX1 | CAGGAGGAAGCGATGGCTTCAG | TTTT |
| | | (SEQ ID NO: 837) | |
| ID415 | RUNX1 | CAGGAGGAAGCGATGGCTTCAG | TTTT |
| | | (SEQ ID NO: 837) | |
| ID416 | RUNX1_T1 | TTTTTACAAAGGTGCATTTTTTA | ATTTG |
| | | (SEQ ID NO: 840) | |
| ID416 | RUNX1_T2 | CTCAGCTTTGCCTGTAATGAAAT | TTTTG |
| | | (SEQ ID NO: 841) | |
| ID417 | RUNX1 | CAGGAGGAAGCGATGGCTTCAG | TTTT |
| | | (SEQ ID NO: 837) | |
| ID418 | RUNX1 | CAGGAGGAAGCGATGGCTTCAG | TTTT |
| | | (SEQ ID NO: 837) | |
| ID419 | RUNX1 | CAGGAGGAAGCGATGGCTTCAG | TTTT |
| | | (SEQ ID NO: 837) | |
| ID420 | RUNX1 | CAGGAGGAAGCGATGGCTTCAG | TTTT |
| | | (SEQ ID NO: 837) | |
| ID421 | RUNX1 | CAGGAGGAAGCGATGGCTTCAG | TTTT |
| | | (SEQ ID NO: 837) | |
| ID422 | RUNX1 | CAGGAGGAAGCGATGGCTTCAG | TTTT |
| | | (SEQ ID NO: 837) | |
| ID423 | RUNX1_T1 | AGACAGCATATTTGAGTCATTTC | GCTTC |
| | | (SEQ ID NO: 842) | |
| ID423 | RUNX1_T2 | ACCTCGGTGCAGAGATGCCTCGG | GTTTC |
| | | (SEQ ID NO: 843) | |
| ID424 | RUNX1 | CTTACTAATCAGATGGAAGCTCT | ATTA |
| | | (SEQ ID NO: 844) | |
| ID425 | RUNX1 | CAGGAGGAAGCGATGGCTTCAG | TTTT |
| | | (SEQ ID NO: 837) | |
| ID426 | RUNX1 | CAGGAGGAAGCGATGGCTTCAG | TTTT |
| | | (SEQ ID NO: 837) | |
| ID427 | RUNX1 | CAGGAGGAAGCGATGGCTTCAG | TTTT |
| | | (SEQ ID NO: 837) | |
| ID428 | RUNX1 | CAGGAGGAAGCGATGGCTTCAG | TTTT |
| | | (SEQ ID NO: 837) | |
| ID429 | RUNX1 | CAGGAGGAAGCGATGGCTTCAG | TTTT |
| | | (SEQ ID NO: 837) | |
| ID432 | RUNX1 | CAGGAGGAAGCGATGGCTTCAG | TTTT |
| | | (SEQ ID NO: 837) | |
| ID433 | RUNX1_T1 | AGCTTTGCCTGTAATGAAATGGC | CTC |
| | | (SEQ ID NO: 838) | |
| ID433 | RUNX1_T2 | GGTGCAGAGATGCCTCGGTGCCT | CTC |
| | | (SEQ ID NO: 839) | |
| LbaCas12a | SCN1A | CTCCATCTTGTCATCCTGCA | TTTG |
| | | (SEQ ID NO: 845) | |
| ID401 | SCN1A | CTCCATCTTGTCATCCTGCA | TTTG |
| | | (SEQ ID NO: 845) | |
| ID402 | SCN1A | CTCCATCTTGTCATCCTGCA | TTTG |
| | | (SEQ ID NO: 845) | |
| ID403 | SCN1A | CTCCATCTTGTCATCCTGCA | TTTG |
| | | (SEQ ID NO: 845) | |
| ID404 | SCN1A | CTCCATCTTGTCATCCTGCA | TTTG |
| | | (SEQ ID NO: 845) | |
| ID405 | SCN1A | CTCCATCTTGTCATCCTGCA | TTTG |
| | | (SEQ ID NO: 845) | |
| ID406 | SCN1A | CTCCATCTTGTCATCCTGCA | TTTG |
| | | (SEQ ID NO: 845) | |
| ID407 | SCN1A | CTCCATCTTGTCATCCTGCA | TTTG |
| | | (SEQ ID NO: 845) | |
| ID408 | SCN1A | CTCCATCTTGTCATCCTGCA | TTTG |
| | | (SEQ ID NO: 845) | |
| ID409 | SCN1A_T1 | TGGTGAAGAAGTTGAAGCTGTCA | CTC |
| | | (SEQ ID NO: 789) | |
| ID409 | SCN1A_T2 | CATCTTGTCATCCTGCACATTTT | CTC |
| | | (SEQ ID NO: 790) | |
| ID410 | SCN1A | CTCCATCTTGTCATCCTGCA | TTTG |
| | | (SEQ ID NO: 845) | |
| ID411 | SCN1A | CTCCATCTTGTCATCCTGCA | TTTG |
| | | (SEQ ID NO: 845) | |
| ID412 | SCN1A | CTCCATCTTGTCATCCTGCA | TTTG |
| | | (SEQ ID NO: 845) | |
| ID413 | SCN1A | CTCCATCTTGTCATCCTGCA | TTTG |
| | | (SEQ ID NO: 845) | |
| ID414 | SCN1A | CTCCATCTTGTCATCCTGCA | TTTG |
| | | (SEQ ID NO: 845) | |
| ID415 | SCN1A | CTCCATCTTGTCATCCTGCA | TTTG |
| | | (SEQ ID NO: 845) | |
| ID416 | SCN1A | CTCCATCTTGTCATCCTGCA | GTTTG |
| | | (SEQ ID NO: 845) | |
| ID417 | SCN1A | CTCCATCTTGTCATCCTGCA | TTTG |
| | | (SEQ ID NO: 845) | |
| ID418 | SCN1A | CTCCATCTTGTCATCCTGCA | TTTG |
| | | (SEQ ID NO: 845) | |
| ID419 | SCN1A | CTCCATCTTGTCATCCTGCA | TTTG |
| | | (SEQ ID NO: 845) | |
| ID420 | SCN1A | CTCCATCTTGTCATCCTGCA | TTTG |
| | | (SEQ ID NO: 845) | |
| ID421 | SCN1A | CTCCATCTTGTCATCCTGCA | TTTG |
| | | (SEQ ID NO: 845) | |
| ID422 | SCN1A | CTCCATCTTGTCATCCTGCA | TTTG |
| | | (SEQ ID NO: 845) | |
| ID423 | SCN1A_T1 | TTTGCCTTTTCTTCTGCAATGCG | GATTC |
| | | (SEQ ID NO: 846) | |
| ID423 | SCN1A_T2 | TCTGGTGAAGAAGTTGAAGCTGT | GATTC |
| | | (SEQ ID NO: 847) | |
| ID424 | SCN1A | CTCCATCTTGTCATCCTGCA | TTTG |
| | | (SEQ ID NO: 845) | |
| ID425 | SCN1A | CTCCATCTTGTCATCCTGCA | TTTG |
| | | (SEQ ID NO: 845) | |
| ID426 | SCN1A | CTCCATCTTGTCATCCTGCA | TTTG |
| | | (SEQ ID NO: 845) | |
| ID427 | SCN1A | CTCCATCTTGTCATCCTGCA | TTTG |
| | | (SEQ ID NO: 845) | |
| ID428 | SCN1A | CTCCATCTTGTCATCCTGCA | TTTG |
| | | (SEQ ID NO: 845) | |
| ID429 | SCN1A | CTCCATCTTGTCATCCTGCA | TTTG |
| | | (SEQ ID NO: 845) | |
| ID432 | SCN1A | CTCCATCTTGTCATCCTGCA | TTTG |
| | | (SEQ ID NO: 845) | |
| ID433 | SCN1A_T1 | TGGTGAAGAAGTTGAAGCTGTCA | CTC |
| | | (SEQ ID NO: 789) | |
| ID433 | SCN1A_T2 | CATCTTGTCATCCTGCACATTTT | CTC |
| | | (SEQ ID NO: 790) | |
| LbaCas12a | FANCF | GTCGGCATGGCCCCATTCGCACG | TTTG |
| | site 1 | (SEQ ID NO: 848) | |
| ID401 | FANCF | GTCGGCATGGCCCCATTCGCACG | TTTG |
| | site 1 | (SEQ ID NO: 848) | |
| ID402 | FANCF | GTCGGCATGGCCCCATTCGCACG | TTTG |
| | site 1 | (SEQ ID NO: 848) | |
| ID403 | FANCF | GTCGGCATGGCCCCATTCGCACG | TTTG |
| | site 1 | (SEQ ID NO: 848) | |
| ID404 | FANCF | GTCGGCATGGCCCCATTCGCACG | TTTG |
| | site 1 | (SEQ ID NO: 848) | |
| ID405 | FANCF | GTCGGCATGGCCCCATTCGCACG | TTTG |
| | site 1 | (SEQ ID NO: 848) | |
| ID406 | FANCF | GTCGGCATGGCCCCATTCGCACG | TTTG |
| | site 1 | (SEQ ID NO: 848) | |
| ID407 | FANCF | GTCGGCATGGCCCCATTCGCACG | TTTG |
| | site 1 | (SEQ ID NO: 848) | |
| ID408 | FANCF | GTCGGCATGGCCCCATTCGCACG | TTTG |
| | site 1 | (SEQ ID NO: 848) | |
| ID409 | FANCF | ATGGAATCCCTTCTGCAGCACCT | CTC |
| | site 1 | (SEQ ID NO: 849) | |
| ID410 | FANCF | GTCGGCATGGCCCCATTCGCACG | TTTG |
| | site 1 | (SEQ ID NO: 848) | |
| ID411 | FANCF | GTCGGCATGGCCCCATTCGCACG | TTTG |
| | site 1 | (SEQ ID NO: 848) | |
| ID412 | FANCF | GTCGGCATGGCCCCATTCGCACG | TTTG |
| | site 1 | (SEQ ID NO: 848) | |
| ID413 | FANCF | GTCGGCATGGCCCCATTCGCACG | TTTG |
| | site 1 | (SEQ ID NO: 848) | |
| ID414 | FANCF | GTCGGCATGGCCCCATTCGCACG | TTTG |
| | site 1 | (SEQ ID NO: 848) | |
| ID415 | FANCF | GTCGGCATGGCCCCATTCGCACG | TTTG |
| | site 1 | (SEQ ID NO: 848) | |
| ID416 | FANCF | TCCTAAAAATTACGAAAACGAAA | TTTTG |
| | site 1 | (SEQ ID NO: 850) | |
| ID417 | FANCF | GTCGGCATGGCCCCATTCGCACG | TTTG |
| | site 1 | (SEQ ID NO: 848) | |
| ID418 | FANCF | GTCGGCATGGCCCCATTCGCACG | TTTG |
| | site 1 | (SEQ ID NO: 848) | |
| ID419 | FANCF | GTCGGCATGGCCCCATTCGCACG | TTTG |
| | site 1 | (SEQ ID NO: 848) | |
| ID420 | FANCF | GTCGGCATGGCCCCATTCGCACG | TTTG |
| | site 1 | (SEQ ID NO: 848) | |
| ID421 | FANCF | GTCGGCATGGCCCCATTCGCACG | TTTG |
| | site 1 | (SEQ ID NO: 848) | |
| ID422 | FANCF | GTCGGCATGGCCCCATTCGCACG | TTTG |
| | site 1 | (SEQ ID NO: 848) | |
| ID423 | FANCF | AAATAATCTGGGCTTCAGTTCTA | GTTTC |
| | site 1 | (SEQ ID NO: 851) | |
| ID424 | FANCF | GCGAACTTCCAGGCCCTCGGTCA | ATTA |
| | site 1 | (SEQ ID NO: 852) | |
| ID425 | FANCF | GTCGGCATGGCCCCATTCGCACG | TTTG |
| | site 1 | (SEQ ID NO: 848) | |
| ID426 | FANCF | GTCGGCATGGCCCCATTCGCACG | TTTG |
| | site 1 | (SEQ ID NO: 848) | |
| ID427 | FANCF | GTCGGCATGGCCCCATTCGCACG | TTTG |
| | site 1 | (SEQ ID NO: 848) | |
| ID428 | FANCF | TGGCGTTACTTAATTTTGAAAAA | CTC |
| | site 1 | (SEQ ID NO: 853) | |
| ID429 | FANCF | GTCGGCATGGCCCCATTCGCACG | TTTG |
| | site 1 | (SEQ ID NO: 848) | |
| ID432 | FANCF | GTCGGCATGGCCCCATTCGCACG | TTTG |
| | site 1 | (SEQ ID NO: 848) | |
| ID433 | FANCF | TGGCGTTACTTAATTTTGAAAAA | CTC |
| | site 1 | (SEQ ID NO: 853) | |
| LbaCas12a | FANCF | GCGGATGTTCCAATCAGTACGC | TTTC |
| | site 2 | (SEQ ID NO: 854) | |
| ID401 | FANCF | GCGGATGTTCCAATCAGTACGC | TTTC |
| | site 2 | (SEQ ID NO: 854) | |
| ID402 | FANCF | GCGGATGTTCCAATCAGTACGC | TTTC |
| | site 2 | (SEQ ID NO: 854) | |
| ID403 | FANCF | GCGGATGTTCCAATCAGTACGC | TTTC |
| | site 2 | (SEQ ID NO: 854) | |
| ID404 | FANCF | GCGGATGTTCCAATCAGTACGC | TTTC |
| | site 2 | (SEQ ID NO: 854) | |
| ID405 | FANCF | GCGGATGTTCCAATCAGTACGC | TTTC |
| | site 2 | (SEQ ID NO: 854) | |
| ID406 | FANCF | GCGGATGTTCCAATCAGTACGC | TTTC |
| | site 2 | (SEQ ID NO: 854) | |
| ID407 | FANCF | GCGGATGTTCCAATCAGTACGC | TTTC |
| | site 2 | (SEQ ID NO: 854) | |
| ID408 | FANCF | GCGGATGTTCCAATCAGTACGC | TTTC |
| | site 2 | (SEQ ID NO: 854) | |
| ID409 | FANCF | AAGCACTACCTACGTCAGCACCT | CTC |
| | site 2 | (SEQ ID NO: 791) | |
| ID410 | FANCF | GCGGATGTTCCAATCAGTACGC | TTTC |
| | site 2 | (SEQ ID NO: 854) | |
| ID411 | FANCF | GCGGATGTTCCAATCAGTACGC | TTTC |
| | site 2 | (SEQ ID NO: 854) | |
| ID412 | FANCF | GCGGATGTTCCAATCAGTACGC | TTTC |
| | site 2 | (SEQ ID NO: 854) | |
| ID413 | FANCF | GCGGATGTTCCAATCAGTACGC | TTTC |
| | site 2 | (SEQ ID NO: 854) | |
| ID414 | FANCF | GCGGATGTTCCAATCAGTACGC | TTTC |
| | site 2 | (SEQ ID NO: 854) | |
| ID415 | FANCF | GCGGATGTTCCAATCAGTACGC | TTTC |
| | site 2 | (SEQ ID NO: 854) | |
| ID416 | FANCF | AAAAACCTCAACACAGATTCTAG | TTTTG |
| | site 2 | (SEQ ID NO: 855) | |
| ID417 | FANCF | GCGGATGTTCCAATCAGTACGC | TTTC |
| | site 2 | (SEQ ID NO: 854) | |
| ID418 | FANCF | GCGGATGTTCCAATCAGTACGC | TTTC |
| | site 2 | (SEQ ID NO: 854) | |
| ID419 | FANCF | GCGGATGTTCCAATCAGTACGC | TTTC |
| | site 2 | (SEQ ID NO: 854) | |
| ID420 | FANCF | GCGGATGTTCCAATCAGTACGC | TTTC |
| | site 2 | (SEQ ID NO: 854) | |
| ID421 | FANCF | GCGGATGTTCCAATCAGTACGC | TTTC |
| | site 2 | (SEQ ID NO: 854) | |
| ID422 | FANCF | GCGGATGTTCCAATCAGTACGC | TTTC |
| | site 2 | (SEQ ID NO: 854) | |
| ID423 | FANCF | CTCACGTCACAGTATGTCTCTGG | GTTTC |
| | site 2 | (SEQ ID NO: 856) | |
| ID424 | FANCF | GCGGATGTTCCAATCAGTACGC | TTTC |
| | site 2 | (SEQ ID NO: 854) | |
| ID425 | FANCF | GCGGATGTTCCAATCAGTACGC | TTTC |
| | site 2 | (SEQ ID NO: 854) | |
| ID426 | FANCF | GCGGATGTTCCAATCAGTACGC | TTTC |
| | site 2 | (SEQ ID NO: 854) | |
| ID427 | FANCF | GCGGATGTTCCAATCAGTACGC | TTTC |
| | site 2 | (SEQ ID NO: 854) | |
| ID428 | FANCF | AAGCACTACCTACGTCAGCACCT | CTC |
| | site 2 | (SEQ ID NO: 791) | |
| ID429 | FANCF | GCGGATGTTCCAATCAGTACGC | TTTC |
| | site 2 | (SEQ ID NO: 854) | |
| ID432 | FANCF | GCGGATGTTCCAATCAGTACGC | TTTC |
| | site 2 | (SEQ ID NO: 854) | |
| ID433 | FANCF | AAGCACTACCTACGTCAGCACCT | CTC |
| | site 2 | (SEQ ID NO: 791) | |

TABLE S3
crRNA cassette sequences HEK293T

| Cas12a | | |
|---|---|---|
| nuclease | Target | Full cassette sequence |
| LbaCas12a | DNMT1 | AAGGTCGGGCAGGAAGAGGGCCTATTTCCCATGATTCCTTCATATTTGCATATACGAT |
| | | ACAAGGCTGTTAGAGAGATAATTAGAATTAATTTGACTGTAAACACAAAGATATTAGT |
| | | ACAAAATACGTGACGTAGAAAGTAATAATTTCTTGGGTAGTTTGCAGTTTTAAAATTA |
| | | TGTTTTAAAATGGACTATCATATGCTTACCGTAACTTGAAAGTATTTCGATTTCTTGGCT |
| | | TTATATATCTTGTGGAAAGGACGAAACACCTAATTTCTACTAAGTGTAGATCCTCACTC |
| | | CTGCTCGGTGAATTTGGCCGGCATGGTCCCAGCCTCCTCGCTGGCGCCGGCTGGGCA |
| | | ACATGCTTCGGCATGGCGAATGGGAC (SEQ ID NO: 956) |
| ID401 | DNMT1 | AAGGTCGGGCAGGAAGAGGGCCTATTTCCCATGATTCCTTCATATTTGCATATACGAT |
| | | ACAAGGCTGTTAGAGAGATAATTAGAATTAATTTGACTGTAAACACAAAGATATTAGT |
| | | ACAAAATACGTGACGTAGAAAGTAATAATTTCTTGGGTAGTTTGCAGTTTTAAAATTA |
| | | TGTTTTAAAATGGACTATCATATGCTTACCGTAACTTGAAAGTATTTCGATTTCTTGGCT |
| | | TTATATATCTTGTGGAAAGGACGAAACACCAGAATTTCTACTGTTGTAGATCCTCACTC |
| | | CTGCTCGGTGAATTTGGCCGGCATGGTCCCAGCCTCCTCGCTGGCGCCGGCTGGGCA |
| | | ACATGCTTCGGCATGGCGAATGGGAC (SEQ ID NO: 957) |
| ID402 | DNMT1 | AAGGTCGGGCAGGAAGAGGGCCTATTTCCCATGATTCCTTCATATTTGCATATACGAT |
| | | ACAAGGCTGTTAGAGAGATAATTAGAATTAATTTGACTGTAAACACAAAGATATTAGT |
| | | ACAAAATACGTGACGTAGAAAGTAATAATTTCTTGGGTAGTTTGCAGTTTTAAAATTA |
| | | TGTTTTAAAATGGACTATCATATGCTTACCGTAACTTGAAAGTATTTCGATTTCTTGGCT |
| | | TTATATATCTTGTGGAAAGGACGAAACACCAAAATTTCTACTCTTGTAGATCCTCACTC |
| | | CTGCTCGGTGAATTTGGCCGGCATGGTCCCAGCCTCCTCGCTGGCGCCGGCTGGGCA |
| | | ACATGCTTCGGCATGGCGAATGGGAC (SEQ ID NO: 958) |
| ID403 | DNMT1 | AAGGTCGGGCAGGAAGAGGGCCTATTTCCCATGATTCCTTCATATTTGCATATACGAT |
| | | ACAAGGCTGTTAGAGAGATAATTAGAATTAATTTGACTGTAAACACAAAGATATTAGT |
| | | ACAAAATACGTGACGTAGAAAGTAATAATTTCTTGGGTAGTTTGCAGTTTTAAAATTA |
| | | TGTTTTAAAATGGACTATCATATGCTTACCGTAACTTGAAAGTATTTCGATTTCTTGGCT |
| | | TTATATATCTTGTGGAAAGGACGAAACACCAAAATTTCTACTATTGTAGATCCTCACTC |
| | | CTGCTCGGTGAATTTGGCCGGCATGGTCCCAGCCTCCTCGCTGGCGCCGGCTGGGCA |
| | | ACATGCTTCGGCATGGCGAATGGGAC (SEQ ID NO: 959) |
| ID404 | DNMT1 | AAGGTCGGGCAGGAAGAGGGCCTATTTCCCATGATTCCTTCATATTTGCATATACGAT |
| | | ACAAGGCTGTTAGAGAGATAATTAGAATTAATTTGACTGTAAACACAAAGATATTAGT |
| | | ACAAAATACGTGACGTAGAAAGTAATAATTTCTTGGGTAGTTTGCAGTTTTAAAATTA |
| | | TGTTTTAAAATGGACTATCATATGCTTACCGTAACTTGAAAGTATTTCGATTTCTTGGCT |
| | | TTATATATCTTGTGGAAAGGACGAAACACCAAAATTTCTACTCTTGTAGATCCTCACTC |
| | | CTGCTCGGTGAATTTGGCCGGCATGGTCCCAGCCTCCTCGCTGGCGCCGGCTGGGCA |
| | | ACATGCTTCGGCATGGCGAATGGGAC (SEQ ID NO: 958) |
| ID405 | DNMT1 | AAGGTCGGGCAGGAAGAGGGCCTATTTCCCATGATTCCTTCATATTTGCATATACGAT |
| | | ACAAGGCTGTTAGAGAGATAATTAGAATTAATTTGACTGTAAACACAAAGATATTAGT |
| | | ACAAAATACGTGACGTAGAAAGTAATAATTTCTTGGGTAGTTTGCAGTTTTAAAATTA |
| | | TGTTTTAAAATGGACTATCATATGCTTACCGTAACTTGAAAGTATTTCGATTTCTTGGCT |
| | | TTATATATCTTGTGGAAAGGACGAAACACCTGAATTTCTACTGTTGTAGATCCTCACTC |
| | | CTGCTCGGTGAATTTGGCCGGCATGGTCCCAGCCTCCTCGCTGGCGCCGGCTGGGCA |
| | | ACATGCTTCGGCATGGCGAATGGGAC (SEQ ID NO: 960) |
| ID406 | DNMT1 | AAGGTCGGGCAGGAAGAGGGCCTATTTCCCATGATTCCTTCATATTTGCATATACGAT |
| | | ACAAGGCTGTTAGAGAGATAATTAGAATTAATTTGACTGTAAACACAAAGATATTAGT |
| | | ACAAAATACGTGACGTAGAAAGTAATAATTTCTTGGGTAGTTTGCAGTTTTAAAATTA |
| | | TGTTTTAAAATGGACTATCATATGCTTACCGTAACTTGAAAGTATTTCGATTTCTTGGCT |
| | | TTATATATCTTGTGGAAAGGACGAAACACCTAAATTTCTACTGTTGTAGATCCTCACTC |
| | | CTGCTCGGTGAATTTGGCCGGCATGGTCCCAGCCTCCTCGCTGGCGCCGGCTGGGCA |
| | | ACATGCTTCGGCATGGCGAATGGGAC (SEQ ID NO: 961) |
| ID407 | DNMT1 | AAGGTCGGGCAGGAAGAGGGCCTATTTCCCATGATTCCTTCATATTTGCATATACGAT |
| | | ACAAGGCTGTTAGAGAGATAATTAGAATTAATTTGACTGTAAACACAAAGATATTAGT |
| | | ACAAAATACGTGACGTAGAAAGTAATAATTTCTTGGGTAGTTTGCAGTTTTAAAATTA |
| | | TGTTTTAAAATGGACTATCATATGCTTACCGTAACTTGAAAGTATTTCGATTTCTTGGCT |
| | | TTATATATCTTGTGGAAAGGACGAAACACCAAAATTTCTACTATTGTAGATCCTCACTC |
| | | CTGCTCGGTGAATTTGGCCGGCATGGTCCCAGCCTCCTCGCTGGCGCCGGCTGGGCA |
| | | ACATGCTTCGGCATGGCGAATGGGAC (SEQ ID NO: 959) |
| ID408 | DNMT1 | AAGGTCGGGCAGGAAGAGGGCCTATTTCCCATGATTCCTTCATATTTGCATATACGAT |
| | | ACAAGGCTGTTAGAGAGATAATTAGAATTAATTTGACTGTAAACACAAAGATATTAGT |
| | | ACAAAATACGTGACGTAGAAAGTAATAATTTCTTGGGTAGTTTGCAGTTTTAAAATTA |
| | | TGTTTTAAAATGGACTATCATATGCTTACCGTAACTTGAAAGTATTTCGATTTCTTGGCT |
| | | TTATATATCTTGTGGAAAGGACGAAACACCAAAATTTCTGCTATTGCAGATCCTCACTC |
| | | CTGCTCGGTGAATTTGGCCGGCATGGTCCCAGCCTCCTCGCTGGCGCCGGCTGGGCA |
| | | ACATGCTTCGGCATGGCGAATGGGAC (SEQ ID NO: 962) |
| ID409 | DNMT1_T1 | AAGGTCGGGCAGGAAGAGGGCCTATTTCCCATGATTCCTTCATATTTGCATATACGAT |
| | | ACAAGGCTGTTAGAGAGATAATTAGAATTAATTTGACTGTAAACACAAAGATATTAGT |
| | | ACAAAATACGTGACGTAGAAAGTAATAATTTCTTGGGTAGTTTGCAGTTTTAAAATTA |
| | | TGTTTTAAAATGGACTATCATATGCTTACCGTAACTTGAAAGTATTTCGATTTCTTGGCT |
| | | TTATATATCTTGTGGAAAGGACGAAACACCTAAATTTCTACTATTGTAGATTGGGACTC |
| | | AGGCGGGTCACCTACGGCCGGCATGGTCCCAGCCTCCTCGCTGGCGCCGGCTGGGCA |
| | | ACATGCTTCGGCATGGCGAATGGGAC (SEQ ID NO: 963) |
| ID409 | DNMT1_T2 | AAGGTCGGGCAGGAAGAGGGCCTATTTCCCATGATTCCTTCATATTTGCATATACGAT |
| | | ACAAGGCTGTTAGAGAGATAATTAGAATTAATTTGACTGTAAACACAAAGATATTAGT |
| | | ACAAAATACGTGACGTAGAAAGTAATAATTTCTTGGGTAGTTTGCAGTTTTAAAATTA |
| | | TGTTTTAAAATGGACTATCATATGCTTACCGTAACTTGAAAGTATTTCGATTTCTTGGCT |
| | | TTATATATCTTGTGGAAAGGACGAAACACCTAAATTTCTACTATTGTAGATAGCAGGC |
| | | ACCTGCCTCAGCTGCTGGCCGGCATGGTCCCAGCCTCCTCGCTGGCGCCGGCTGGGCA |
| | | ACATGCTTCGGCATGGCGAATGGGAC (SEQ ID NO: 964) |
| ID409 | DNMT1_T3 | AAGGTCGGGCAGGAAGAGGGCCTATTTCCCATGATTCCTTCATATTTGCATATACGAT |
| | | ACAAGGCTGTTAGAGAGATAATTAGAATTAATTTGACTGTAAACACAAAGATATTAGT |
| | | ACAAAATACGTGACGTAGAAAGTAATAATTTCTTGGGTAGTTTGCAGTTTTAAAATTA |
| | | TGTTTTAAAATGGACTATCATATGCTTACCGTAACTTGAAAGTATTTCGATTTCTTGGCT |
| | | TTATATATCTTGTGGAAAGGACGAAACACCTAAATTTCTACTATTGTAGATAGGCGGG |
| | | TCACCTACCCACGTTCGGCCGGCATGGTCCCAGCCTCCTCGCTGGCGCCGGCTGGGCA |
| | | ACATGCTTCGGCATGGCGAATGGGAC (SEQ ID NO: 965) |
| ID409 | DNMT1_T4 | AAGGTCGGGCAGGAAGAGGGCCTATTTCCCATGATTCCTTCATATTTGCATATACGAT |
| | | ACAAGGCTGTTAGAGAGATAATTAGAATTAATTTGACTGTAAACACAAAGATATTAGT |
| | | ACAAAATACGTGACGTAGAAAGTAATAATTTCTTGGGTAGTTTGCAGTTTTAAAATTA |
| | | TGTTTTAAAATGGACTATCATATGCTTACCGTAACTTGAAAGTATTTCGATTTCTTGGCT |
| | | TTATATATCTTGTGGAAAGGACGAAACACCTAAATTTCTACTATTGTAGATACTCCTGC |
| | | TCGGTGAATTTGGCTGGCCGGCATGGTCCCAGCCTCCTCGCTGGCGCCGGCTGGGCA |
| | | ACATGCTTCGGCATGGCGAATGGGAC (SEQ ID NO: 966) |
| ID410 | DNMT1 | AAGGTCGGGCAGGAAGAGGGCCTATTTCCCATGATTCCTTCATATTTGCATATACGAT |
| | | ACAAGGCTGTTAGAGAGATAATTAGAATTAATTTGACTGTAAACACAAAGATATTAGT |
| | | ACAAAATACGTGACGTAGAAAGTAATAATTTCTTGGGTAGTTTGCAGTTTTAAAATTA |
| | | TGTTTTAAAATGGACTATCATATGCTTACCGTAACTTGAAAGTATTTCGATTTCTTGGCT |
| | | TTATATATCTTGTGGAAAGGACGAAACACCATAATTTCTACTATCGTAGATCCTCACTC |
| | | CTGCTCGGTGAATTTGGCCGGCATGGTCCCAGCCTCCTCGCTGGCGCCGGCTGGGCA |
| | | ACATGCTTCGGCATGGCGAATGGGAC (SEQ ID NO: 967) |
| ID411 | DNMT1 | AAGGTCGGGCAGGAAGAGGGCCTATTTCCCATGATTCCTTCATATTTGCATATACGAT |
| | | ACAAGGCTGTTAGAGAGATAATTAGAATTAATTTGACTGTAAACACAAAGATATTAGT |
| | | ACAAAATACGTGACGTAGAAAGTAATAATTTCTTGGGTAGTTTGCAGTTTTAAAATTA |
| | | TGTTTTAAAATGGACTATCATATGCTTACCGTAACTTGAAAGTATTTCGATTTCTTGGCT |
| | | TTATATATCTTGTGGAAAGGACGAAACACCTAAATTTCTACTGTTGTAGATCCTCACTC |
| | | CTGCTCGGTGAATTTGGCCGGCATGGTCCCAGCCTCCTCGCTGGCGCCGGCTGGGCA |
| | | ACATGCTTCGGCATGGCGAATGGGAC (SEQ ID NO: 961) |
| ID412 | DNMT1 | AAGGTCGGGCAGGAAGAGGGCCTATTTCCCATGATTCCTTCATATTTGCATATACGAT |
| | | ACAAGGCTGTTAGAGAGATAATTAGAATTAATTTGACTGTAAACACAAAGATATTAGT |
| | | ACAAAATACGTGACGTAGAAAGTAATAATTTCTTGGGTAGTTTGCAGTTTTAAAATTA |
| | | TGTTTTAAAATGGACTATCATATGCTTACCGTAACTTGAAAGTATTTCGATTTCTTGGCT |
| | | TTATATATCTTGTGGAAAGGACGAAACACCTTAATTTCTACTATTGTAGATCCTCACTC |
| | | CTGCTCGGTGAATTTGGCCGGCATGGTCCCAGCCTCCTCGCTGGCGCCGGCTGGGCA |
| | | ACATGCTTCGGCATGGCGAATGGGAC (SEQ ID NO: 968) |
| ID413 | DNMT1 | AAGGTCGGGCAGGAAGAGGGCCTATTTCCCATGATTCCTTCATATTTGCATATACGAT |
| | | ACAAGGCTGTTAGAGAGATAATTAGAATTAATTTGACTGTAAACACAAAGATATTAGT |
| | | ACAAAATACGTGACGTAGAAAGTAATAATTTCTTGGGTAGTTTGCAGTTTTAAAATTA |
| | | TGTTTTAAAATGGACTATCATATGCTTACCGTAACTTGAAAGTATTTCGATTTCTTGGCT |
| | | TTATATATCTTGTGGAAAGGACGAAACACCATAATTTCTACTATTGTAGATCCTCACTC |
| | | CTGCTCGGTGAATTTGGCCGGCATGGTCCCAGCCTCCTCGCTGGCGCCGGCTGGGCA |
| | | ACATGCTTCGGCATGGCGAATGGGAC (SEQ ID NO: 969) |
| ID414 | DNMT1 | AAGGTCGGGCAGGAAGAGGGCCTATTTCCCATGATTCCTTCATATTTGCATATACGAT |
| | | ACAAGGCTGTTAGAGAGATAATTAGAATTAATTTGACTGTAAACACAAAGATATTAGT |
| | | ACAAAATACGTGACGTAGAAAGTAATAATTTCTTGGGTAGTTTGCAGTTTTAAAATTA |
| | | TGTTTTAAAATGGACTATCATATGCTTACCGTAACTTGAAAGTATTTCGATTTCTTGGCT |
| | | TTATATATCTTGTGGAAAGGACGAAACACCATAATTTCTACTGTTGTAGATCCTCACTC |
| | | CTGCTCGGTGAATTTGGCCGGCATGGTCCCAGCCTCCTCGCTGGCGCCGGCTGGGCA |
| | | ACATGCTTCGGCATGGCGAATGGGAC (SEQ ID NO: 970) |
| ID415 | DNMT1 | AAGGTCGGGCAGGAAGAGGGCCTATTTCCCATGATTCCTTCATATTTGCATATACGAT |
| | | ACAAGGCTGTTAGAGAGATAATTAGAATTAATTTGACTGTAAACACAAAGATATTAGT |
| | | ACAAAATACGTGACGTAGAAAGTAATAATTTCTTGGGTAGTTTGCAGTTTTAAAATTA |
| | | TGTTTTAAAATGGACTATCATATGCTTACCGTAACTTGAAAGTATTTCGATTTCTTGGCT |
| | | TTATATATCTTGTGGAAAGGACGAAACACCTTAATTTCTACTCTCGTAGATCCTCACTC |
| | | CTGCTCGGTGAATTTGGCCGGCATGGTCCCAGCCTCCTCGCTGGCGCCGGCTGGGCA |
| | | ACATGCTTCGGCATGGCGAATGGGAC (SEQ ID NO: 971) |
| ID416 | DNMT1_T1 | AAGGTCGGGCAGGAAGAGGGCCTATTTCCCATGATTCCTTCATATTTGCATATACGAT |
| | | ACAAGGCTGTTAGAGAGATAATTAGAATTAATTTGACTGTAAACACAAAGATATTAGT |
| | | ACAAAATACGTGACGTAGAAAGTAATAATTTCTTGGGTAGTTTGCAGTTTTAAAATTA |
| | | TGTTTTAAAATGGACTATCATATGCTTACCGTAACTTGAAAGTATTTCGATTTCTTGGCT |
| | | TTATATATCTTGTGGAAAGGACGAAACACCATAATTTCTACTATCGTAGATGGCTCTG |
| | | GGACTCAGGCGGGTCAGGCCGGCATGGTCCCAGCCTCCTCGCTGGCGCCGGCTGGGC |
| | | AACATGCTTCGGCATGGCGAATGGGAC (SEQ ID NO: 972) |
| ID416 | DNMT1_T2 | AAGGTCGGGCAGGAAGAGGGCCTATTTCCCATGATTCCTTCATATTTGCATATACGAT |
| | | ACAAGGCTGTTAGAGAGATAATTAGAATTAATTTGACTGTAAACACAAAGATATTAGT |
| | | ACAAAATACGTGACGTAGAAAGTAATAATTTCTTGGGTAGTTTGCAGTTTTAAAATTA |
| | | TGTTTTAAAATGGACTATCATATGCTTACCGTAACTTGAAAGTATTTCGATTTCTTGGCT |
| | | TTATATATCTTGTGGAAAGGACGAAACACCATAATTTCTACTATCGTAGATGCTCAGCA |
| | | GGCACCTGCCTCAGCGGCCGGCATGGTCCCAGCCTCCTCGCTGGCGCCGGCTGGGCA |
| | | ACATGCTTCGGCATGGCGAATGGGAC (SEQ ID NO: 973) |
| ID417 | DNMT1 | AAGGTCGGGCAGGAAGAGGGCCTATTTCCCATGATTCCTTCATATTTGCATATACGAT |
| | | ACAAGGCTGTTAGAGAGATAATTAGAATTAATTTGACTGTAAACACAAAGATATTAGT |
| | | ACAAAATACGTGACGTAGAAAGTAATAATTTCTTGGGTAGTTTGCAGTTTTAAAATTA |
| | | TGTTTTAAAATGGACTATCATATGCTTACCGTAACTTGAAAGTATTTCGATTTCTTGGCT |
| | | TTATATATCTTGTGGAAAGGACGAAACACCTAAATTTCTACTGTTGTAGATCCTCACTC |
| | | CTGCTCGGTGAATTTGGCCGGCATGGTCCCAGCCTCCTCGCTGGCGCCGGCTGGGCA |
| | | ACATGCTTCGGCATGGCGAATGGGAC (SEQ ID NO: 961) |
| ID418 | DNMT1 | AAGGTCGGGCAGGAAGAGGGCCTATTTCCCATGATTCCTTCATATTTGCATATACGAT |
| | | ACAAGGCTGTTAGAGAGATAATTAGAATTAATTTGACTGTAAACACAAAGATATTAGT |
| | | ACAAAATACGTGACGTAGAAAGTAATAATTTCTTGGGTAGTTTGCAGTTTTAAAATTA |
| | | TGTTTTAAAATGGACTATCATATGCTTACCGTAACTTGAAAGTATTTCGATTTCTTGGCT |
| | | TTATATATCTTGTGGAAAGGACGAAACACCTAAATTTCTACTATTGTAGATCCTCACTC |
| | | CTGCTCGGTGAATTTGGCCGGCATGGTCCCAGCCTCCTCGCTGGCGCCGGCTGGGCA |
| | | ACATGCTTCGGCATGGCGAATGGGAC (SEQ ID NO: 974) |
| ID419 | DNMT1 | AAGGTCGGGCAGGAAGAGGGCCTATTTCCCATGATTCCTTCATATTTGCATATACGAT |
| | | ACAAGGCTGTTAGAGAGATAATTAGAATTAATTTGACTGTAAACACAAAGATATTAGT |
| | | ACAAAATACGTGACGTAGAAAGTAATAATTTCTTGGGTAGTTTGCAGTTTTAAAATTA |
| | | TGTTTTAAAATGGACTATCATATGCTTACCGTAACTTGAAAGTATTTCGATTTCTTGGCT |
| | | TTATATATCTTGTGGAAAGGACGAAACACCAGAATTTCTACTGTTGTAGATCCTCACTC |
| | | CTGCTCGGTGAATTTGGCCGGCATGGTCCCAGCCTCCTCGCTGGCGCCGGCTGGGCA |
| | | ACATGCTTCGGCATGGCGAATGGGAC (SEQ ID NO: 957) |
| ID420 | DNMT1 | AAGGTCGGGCAGGAAGAGGGCCTATTTCCCATGATTCCTTCATATTTGCATATACGAT |
| | | ACAAGGCTGTTAGAGAGATAATTAGAATTAATTTGACTGTAAACACAAAGATATTAGT |
| | | ACAAAATACGTGACGTAGAAAGTAATAATTTCTTGGGTAGTTTGCAGTTTTAAAATTA |
| | | TGTTTTAAAATGGACTATCATATGCTTACCGTAACTTGAAAGTATTTCGATTTCTTGGCT |
| | | TTATATATCTTGTGGAAAGGACGAAACACCATAATTTCTACTATTGTAGATCCTCACTC |
| | | CTGCTCGGTGAATTTGGCCGGCATGGTCCCAGCCTCCTCGCTGGCGCCGGCTGGGCA |
| | | ACATGCTTCGGCATGGCGAATGGGAC (SEQ ID NO: 969) |
| ID421 | DNMT1 | AAGGTCGGGCAGGAAGAGGGCCTATTTCCCATGATTCCTTCATATTTGCATATACGAT |
| | | ACAAGGCTGTTAGAGAGATAATTAGAATTAATTTGACTGTAAACACAAAGATATTAGT |
| | | ACAAAATACGTGACGTAGAAAGTAATAATTTCTTGGGTAGTTTGCAGTTTTAAAATTA |
| | | TGTTTTAAAATGGACTATCATATGCTTACCGTAACTTGAAAGTATTTCGATTTCTTGGCT |
| | | TTATATATCTTGTGGAAAGGACGAAACACCATAATTTCTACTATTGTAGATCCTCACTC |
| | | CTGCTCGGTGAATTTGGCCGGCATGGTCCCAGCCTCCTCGCTGGCGCCGGCTGGGCA |
| | | ACATGCTTCGGCATGGCGAATGGGAC (SEQ ID NO: 969) |
| ID422 | DNMT1 | AAGGTCGGGCAGGAAGAGGGCCTATTTCCCATGATTCCTTCATATTTGCATATACGAT |
| | | ACAAGGCTGTTAGAGAGATAATTAGAATTAATTTGACTGTAAACACAAAGATATTAGT |
| | | ACAAAATACGTGACGTAGAAAGTAATAATTTCTTGGGTAGTTTGCAGTTTTAAAATTA |
| | | TGTTTTAAAATGGACTATCATATGCTTACCGTAACTTGAAAGTATTTCGATTTCTTGGCT |
| | | TTATATATCTTGTGGAAAGGACGAAACACCAAAATTTCTACTATTGTAGATCCTCACTC |
| | | CTGCTCGGTGAATTTGGCCGGCATGGTCCCAGCCTCCTCGCTGGCGCCGGCTGGGCA |
| | | ACATGCTTCGGCATGGCGAATGGGAC (SEQ ID NO: 959) |
| ID423 | DNMT1_T1 | AAGGTCGGGCAGGAAGAGGGCCTATTTCCCATGATTCCTTCATATTTGCATATACGAT |
| | | ACAAGGCTGTTAGAGAGATAATTAGAATTAATTTGACTGTAAACACAAAGATATTAGT |
| | | ACAAAATACGTGACGTAGAAAGTAATAATTTCTTGGGTAGTTTGCAGTTTTAAAATTA |
| | | TGTTTTAAAATGGACTATCATATGCTTACCGTAACTTGAAAGTATTTCGATTTCTTGGCT |
| | | TTATATATCTTGTGGAAAGGACGAAACACCGAAATTTCTACTATCGTAGATCCTCACTC |
| | | CTGCTCGGTGAATTTGGCCGGCATGGTCCCAGCCTCCTCGCTGGCGCCGGCTGGGCA |
| | | ACATGCTTCGGCATGGCGAATGGGAC (SEQ ID NO: 975) |
| ID423 | DNMT1_T2 | AAGGTCGGGCAGGAAGAGGGCCTATTTCCCATGATTCCTTCATATTTGCATATACGAT |
| | | ACAAGGCTGTTAGAGAGATAATTAGAATTAATTTGACTGTAAACACAAAGATATTAGT |
| | | ACAAAATACGTGACGTAGAAAGTAATAATTTCTTGGGTAGTTTGCAGTTTTAAAATTA |
| | | TGTTTTAAAATGGACTATCATATGCTTACCGTAACTTGAAAGTATTTCGATTTCTTGGCT |
| | | TTATATATCTTGTGGAAAGGACGAAACACCGAAATTTCTACTATCGTAGATCTGATGG |
| | | TCCATGTCTGTTACTCGGCCGGCATGGTCCCAGCCTCCTCGCTGGCGCCGGCTGGGCA |
| | | ACATGCTTCGGCATGGCGAATGGGAC (SEQ ID NO: 976) |
| ID424 | DNMT1 | AAGGTCGGGCAGGAAGAGGGCCTATTTCCCATGATTCCTTCATATTTGCATATACGAT |
| | | ACAAGGCTGTTAGAGAGATAATTAGAATTAATTTGACTGTAAACACAAAGATATTAGT |
| | | ACAAAATACGTGACGTAGAAAGTAATAATTTCTTGGGTAGTTTGCAGTTTTAAAATTA |
| | | TGTTTTAAAATGGACTATCATATGCTTACCGTAACTTGAAAGTATTTCGATTTCTTGGCT |
| | | TTATATATCTTGTGGAAAGGACGAAACACCATAATTTCTACTATTGTAGATCCTCACTC |
| | | CTGCTCGGTGAATTTGGCCGGCATGGTCCCAGCCTCCTCGCTGGCGCCGGCTGGGCA |
| | | ACATGCTTCGGCATGGCGAATGGGAC (SEQ ID NO: 969) |
| ID425 | DNMT1 | AAGGTCGGGCAGGAAGAGGGCCTATTTCCCATGATTCCTTCATATTTGCATATACGAT |
| | | ACAAGGCTGTTAGAGAGATAATTAGAATTAATTTGACTGTAAACACAAAGATATTAGT |
| | | ACAAAATACGTGACGTAGAAAGTAATAATTTCTTGGGTAGTTTGCAGTTTTAAAATTA |
| | | TGTTTTAAAATGGACTATCATATGCTTACCGTAACTTGAAAGTATTTCGATTTCTTGGCT |
| | | TTATATATCTTGTGGAAAGGACGAAACACCTAAATTTCTACTATTGTAGATCCTCACTC |
| | | CTGCTCGGTGAATTTGGCCGGCATGGTCCCAGCCTCCTCGCTGGCGCCGGCTGGGCA |
| | | ACATGCTTCGGCATGGCGAATGGGAC (SEQ ID NO: 974) |
| ID426 | DNMT1 | AAGGTCGGGCAGGAAGAGGGCCTATTTCCCATGATTCCTTCATATTTGCATATACGAT |
| | | ACAAGGCTGTTAGAGAGATAATTAGAATTAATTTGACTGTAAACACAAAGATATTAGT |
| | | ACAAAATACGTGACGTAGAAAGTAATAATTTCTTGGGTAGTTTGCAGTTTTAAAATTA |
| | | TGTTTTAAAATGGACTATCATATGCTTACCGTAACTTGAAAGTATTTCGATTTCTTGGCT |
| | | TTATATATCTTGTGGAAAGGACGAAACACCTCAATTTCTACTGTTGTAGATCCTCACTC |
| | | CTGCTCGGTGAATTTGGCCGGCATGGTCCCAGCCTCCTCGCTGGCGCCGGCTGGGCA |
| | | ACATGCTTCGGCATGGCGAATGGGAC (SEQ ID NO: 977) |
| ID427 | DNMT1 | AAGGTCGGGCAGGAAGAGGGCCTATTTCCCATGATTCCTTCATATTTGCATATACGAT |
| | | ACAAGGCTGTTAGAGAGATAATTAGAATTAATTTGACTGTAAACACAAAGATATTAGT |
| | | ACAAAATACGTGACGTAGAAAGTAATAATTTCTTGGGTAGTTTGCAGTTTTAAAATTA |
| | | TGTTTTAAAATGGACTATCATATGCTTACCGTAACTTGAAAGTATTTCGATTTCTTGGCT |
| | | TTATATATCTTGTGGAAAGGACGAAACACCAAAATTTCTACTATTGTAGATCCTCACTC |
| | | CTGCTCGGTGAATTTGGCCGGCATGGTCCCAGCCTCCTCGCTGGCGCCGGCTGGGCA |
| | | ACATGCTTCGGCATGGCGAATGGGAC (SEQ ID NO: 959) |
| ID428 | DNMT1_T1 | AAGGTCGGGCAGGAAGAGGGCCTATTTCCCATGATTCCTTCATATTTGCATATACGAT |
| | | ACAAGGCTGTTAGAGAGATAATTAGAATTAATTTGACTGTAAACACAAAGATATTAGT |
| | | ACAAAATACGTGACGTAGAAAGTAATAATTTCTTGGGTAGTTTGCAGTTTTAAAATTA |
| | | TGTTTTAAAATGGACTATCATATGCTTACCGTAACTTGAAAGTATTTCGATTTCTTGGCT |
| | | TTATATATCTTGTGGAAAGGACGAAACACCTAAATTTCTACTATTGTAGATTGGGACTC |
| | | AGGCGGGTCACCTACGGCCGGCATGGTCCCAGCCTCCTCGCTGGCGCCGGCTGGGCA |
| | | ACATGCTTCGGCATGGCGAATGGGAC (SEQ ID NO: 963) |
| ID428 | DNMT1_T2 | AAGGTCGGGCAGGAAGAGGGCCTATTTCCCATGATTCCTTCATATTTGCATATACGAT |
| | | ACAAGGCTGTTAGAGAGATAATTAGAATTAATTTGACTGTAAACACAAAGATATTAGT |
| | | ACAAAATACGTGACGTAGAAAGTAATAATTTCTTGGGTAGTTTGCAGTTTTAAAATTA |
| | | TGTTTTAAAATGGACTATCATATGCTTACCGTAACTTGAAAGTATTTCGATTTCTTGGCT |
| | | TTATATATCTTGTGGAAAGGACGAAACACCTAAATTTCTACTATTGTAGATAGGCGGG |
| | | TCACCTACCCACGTTCGGCCGGCATGGTCCCAGCCTCCTCGCTGGCGCCGGCTGGGCA |
| | | ACATGCTTCGGCATGGCGAATGGGAC (SEQ ID NO: 965) |
| ID428 | DNMT1_T3 | AAGGTCGGGCAGGAAGAGGGCCTATTTCCCATGATTCCTTCATATTTGCATATACGAT |
| | | ACAAGGCTGTTAGAGAGATAATTAGAATTAATTTGACTGTAAACACAAAGATATTAGT |
| | | ACAAAATACGTGACGTAGAAAGTAATAATTTCTTGGGTAGTTTGCAGTTTTAAAATTA |
| | | TGTTTTAAAATGGACTATCATATGCTTACCGTAACTTGAAAGTATTTCGATTTCTTGGCT |
| | | TTATATATCTTGTGGAAAGGACGAAACACCTAAATTTCTACTATTGTAGATAGCAGGC |
| | | ACCTGCCTCAGCTGCTGGCCGGCATGGTCCCAGCCTCCTCGCTGGCGCCGGCTGGGCA |
| | | ACATGCTTCGGCATGGCGAATGGGAC (SEQ ID NO: 964) |
| ID428 | DNMT1_T4 | AAGGTCGGGCAGGAAGAGGGCCTATTTCCCATGATTCCTTCATATTTGCATATACGAT |
| | | ACAAGGCTGTTAGAGAGATAATTAGAATTAATTTGACTGTAAACACAAAGATATTAGT |
| | | ACAAAATACGTGACGTAGAAAGTAATAATTTCTTGGGTAGTTTGCAGTTTTAAAATTA |
| | | TGTTTTAAAATGGACTATCATATGCTTACCGTAACTTGAAAGTATTTCGATTTCTTGGCT |
| | | TTATATATCTTGTGGAAAGGACGAAACACCTAAATTTCTACTATTGTAGATACTCCTGC |
| | | TCGGTGAATTTGGCTGGCCGGCATGGTCCCAGCCTCCTCGCTGGCGCCGGCTGGGCA |
| | | ACATGCTTCGGCATGGCGAATGGGAC (SEQ ID NO: 966) |
| ID429 | DNMT1 | AAGGTCGGGCAGGAAGAGGGCCTATTTCCCATGATTCCTTCATATTTGCATATACGAT |
| | | ACAAGGCTGTTAGAGAGATAATTAGAATTAATTTGACTGTAAACACAAAGATATTAGT |
| | | ACAAAATACGTGACGTAGAAAGTAATAATTTCTTGGGTAGTTTGCAGTTTTAAAATTA |
| | | TGTTTTAAAATGGACTATCATATGCTTACCGTAACTTGAAAGTATTTCGATTTCTTGGCT |
| | | TTATATATCTTGTGGAAAGGACGAAACACCATAATTTCTACTGTTGTAGATCCTCACTC |
| | | CTGCTCGGTGAATTTGGCCGGCATGGTCCCAGCCTCCTCGCTGGCGCCGGCTGGGCA |
| | | ACATGCTTCGGCATGGCGAATGGGAC (SEQ ID NO: 970) |
| ID432 | DNMT1 | AAGGTCGGGCAGGAAGAGGGCCTATTTCCCATGATTCCTTCATATTTGCATATACGAT |
| | | ACAAGGCTGTTAGAGAGATAATTAGAATTAATTTGACTGTAAACACAAAGATATTAGT |
| | | ACAAAATACGTGACGTAGAAAGTAATAATTTCTTGGGTAGTTTGCAGTTTTAAAATTA |
| | | TGTTTTAAAATGGACTATCATATGCTTACCGTAACTTGAAAGTATTTCGATTTCTTGGCT |
| | | TTATATATCTTGTGGAAAGGACGAAACACCATAATTTCTACTGTTGTAGATCCTCACTC |
| | | CTGCTCGGTGAATTTGGCCGGCATGGTCCCAGCCTCCTCGCTGGCGCCGGCTGGGCA |
| | | ACATGCTTCGGCATGGCGAATGGGAC (SEQ ID NO: 970) |
| ID433 | DNMT1_T1 | AAGGTCGGGCAGGAAGAGGGCCTATTTCCCATGATTCCTTCATATTTGCATATACGAT |
| | | ACAAGGCTGTTAGAGAGATAATTAGAATTAATTTGACTGTAAACACAAAGATATTAGT |
| | | ACAAAATACGTGACGTAGAAAGTAATAATTTCTTGGGTAGTTTGCAGTTTTAAAATTA |
| | | TGTTTTAAAATGGACTATCATATGCTTACCGTAACTTGAAAGTATTTCGATTTCTTGGCT |
| | | TTATATATCTTGTGGAAAGGACGAAACACCAAAATTTCTGCTATTGCAGATACTCCTGC |
| | | TCGGTGAATTTGGCTGGCCGGCATGGTCCCAGCCTCCTCGCTGGCGCCGGCTGGGCA |
| | | ACATGCTTCGGCATGGCGAATGGGAC (SEQ ID NO: 978) |
| ID433 | DNMT1_T2 | AAGGTCGGGCAGGAAGAGGGCCTATTTCCCATGATTCCTTCATATTTGCATATACGAT |
| | | ACAAGGCTGTTAGAGAGATAATTAGAATTAATTTGACTGTAAACACAAAGATATTAGT |
| | | ACAAAATACGTGACGTAGAAAGTAATAATTTCTTGGGTAGTTTGCAGTTTTAAAATTA |
| | | TGTTTTAAAATGGACTATCATATGCTTACCGTAACTTGAAAGTATTTCGATTTCTTGGCT |
| | | TTATATATCTTGTGGAAAGGACGAAACACCAAAATTTCTGCTATTGCAGATAGCAGGC |
| | | ACCTGCCTCAGCTGCTGGCCGGCATGGTCCCAGCCTCCTCGCTGGCGCCGGCTGGGCA |
| | | ACATGCTTCGGCATGGCGAATGGGAC (SEQ ID NO: 979) |
| ID433 | DNMT1_T3 | AAGGTCGGGCAGGAAGAGGGCCTATTTCCCATGATTCCTTCATATTTGCATATACGAT |
| | | ACAAGGCTGTTAGAGAGATAATTAGAATTAATTTGACTGTAAACACAAAGATATTAGT |
| | | ACAAAATACGTGACGTAGAAAGTAATAATTTCTTGGGTAGTTTGCAGTTTTAAAATTA |
| | | TGTTTTAAAATGGACTATCATATGCTTACCGTAACTTGAAAGTATTTCGATTTCTTGGCT |
| | | TTATATATCTTGTGGAAAGGACGAAACACCAAAATTTCTGCTATTGCAGATAGGCGGG |
| | | TCACCTACCCACGTTCGGCCGGCATGGTCCCAGCCTCCTCGCTGGCGCCGGCTGGGCA |
| | | ACATGCTTCGGCATGGCGAATGGGAC (SEQ ID NO: 980) |
| LbaCas12a | RUNX1 | AAGGTCGGGCAGGAAGAGGGCCTATTTCCCATGATTCCTTCATATTTGCATATACGAT |
| | | ACAAGGCTGTTAGAGAGATAATTAGAATTAATTTGACTGTAAACACAAAGATATTAGT |
| | | ACAAAATACGTGACGTAGAAAGTAATAATTTCTTGGGTAGTTTGCAGTTTTAAAATTA |
| | | TGTTTTAAAATGGACTATCATATGCTTACCGTAACTTGAAAGTATTTCGATTTCTTGGCT |
| | | TTATATATCTTGTGGAAAGGACGAAACACCTAATTTCTACTAAGTGTAGATCAGGAGG |
| | | AAGCGATGGCTTCAGGGCCGGCATGGTCCCAGCCTCCTCGCTGGCGCCGGCTGGGCA |
| | | ACATGCTTCGGCATGGCGAATGGGAC (SEQ ID NO: 981) |
| ID401 | RUNX1 | AAGGTCGGGCAGGAAGAGGGCCTATTTCCCATGATTCCTTCATATTTGCATATACGAT |
| | | ACAAGGCTGTTAGAGAGATAATTAGAATTAATTTGACTGTAAACACAAAGATATTAGT |
| | | ACAAAATACGTGACGTAGAAAGTAATAATTTCTTGGGTAGTTTGCAGTTTTAAAATTA |
| | | TGTTTTAAAATGGACTATCATATGCTTACCGTAACTTGAAAGTATTTCGATTTCTTGGCT |
| | | TTATATATCTTGTGGAAAGGACGAAACACCAGAATTTCTACTGTTGTAGATCAGGAGG |
| | | AAGCGATGGCTTCAGGGCCGGCATGGTCCCAGCCTCCTCGCTGGCGCCGGCTGGGCA |
| | | ACATGCTTCGGCATGGCGAATGGGAC (SEQ ID NO: 982) |
| ID402 | RUNX1 | AAGGTCGGGCAGGAAGAGGGCCTATTTCCCATGATTCCTTCATATTTGCATATACGAT |
| | | ACAAGGCTGTTAGAGAGATAATTAGAATTAATTTGACTGTAAACACAAAGATATTAGT |
| | | ACAAAATACGTGACGTAGAAAGTAATAATTTCTTGGGTAGTTTGCAGTTTTAAAATTA |
| | | TGTTTTAAAATGGACTATCATATGCTTACCGTAACTTGAAAGTATTTCGATTTCTTGGCT |
| | | TTATATATCTTGTGGAAAGGACGAAACACCAAAATTTCTACTCTTGTAGATCAGGAGG |
| | | AAGCGATGGCTTCAGGGCCGGCATGGTCCCAGCCTCCTCGCTGGCGCCGGCTGGGCA |
| | | ACATGCTTCGGCATGGCGAATGGGAC (SEQ ID NO: 983) |
| ID403 | RUNX1 | AAGGTCGGGCAGGAAGAGGGCCTATTTCCCATGATTCCTTCATATTTGCATATACGAT |
| | | ACAAGGCTGTTAGAGAGATAATTAGAATTAATTTGACTGTAAACACAAAGATATTAGT |
| | | ACAAAATACGTGACGTAGAAAGTAATAATTTCTTGGGTAGTTTGCAGTTTTAAAATTA |
| | | TGTTTTAAAATGGACTATCATATGCTTACCGTAACTTGAAAGTATTTCGATTTCTTGGCT |
| | | TTATATATCTTGTGGAAAGGACGAAACACCAAAATTTCTACTATTGTAGATCAGGAGG |
| | | AAGCGATGGCTTCAGGGCCGGCATGGTCCCAGCCTCCTCGCTGGCGCCGGCTGGGCA |
| | | ACATGCTTCGGCATGGCGAATGGGAC (SEQ ID NO: 984) |
| ID404 | RUNX1 | AAGGTCGGGCAGGAAGAGGGCCTATTTCCCATGATTCCTTCATATTTGCATATACGAT |
| | | ACAAGGCTGTTAGAGAGATAATTAGAATTAATTTGACTGTAAACACAAAGATATTAGT |
| | | ACAAAATACGTGACGTAGAAAGTAATAATTTCTTGGGTAGTTTGCAGTTTTAAAATTA |
| | | TGTTTTAAAATGGACTATCATATGCTTACCGTAACTTGAAAGTATTTCGATTTCTTGGCT |
| | | TTATATATCTTGTGGAAAGGACGAAACACCAAAATTTCTACTCTTGTAGATCAGGAGG |
| | | AAGCGATGGCTTCAGGGCCGGCATGGTCCCAGCCTCCTCGCTGGCGCCGGCTGGGCA |
| | | ACATGCTTCGGCATGGCGAATGGGAC (SEQ ID NO: 983) |
| ID405 | RUNX1 | AAGGTCGGGCAGGAAGAGGGCCTATTTCCCATGATTCCTTCATATTTGCATATACGAT |
| | | ACAAGGCTGTTAGAGAGATAATTAGAATTAATTTGACTGTAAACACAAAGATATTAGT |
| | | ACAAAATACGTGACGTAGAAAGTAATAATTTCTTGGGTAGTTTGCAGTTTTAAAATTA |
| | | TGTTTTAAAATGGACTATCATATGCTTACCGTAACTTGAAAGTATTTCGATTTCTTGGCT |
| | | TTATATATCTTGTGGAAAGGACGAAACACCTGAATTTCTACTGTTGTAGATCAGGAGG |
| | | AAGCGATGGCTTCAGGGCCGGCATGGTCCCAGCCTCCTCGCTGGCGCCGGCTGGGCA |
| | | ACATGCTTCGGCATGGCGAATGGGAC (SEQ ID NO: 985) |
| ID406 | RUNX1 | AAGGTCGGGCAGGAAGAGGGCCTATTTCCCATGATTCCTTCATATTTGCATATACGAT |
| | | ACAAGGCTGTTAGAGAGATAATTAGAATTAATTTGACTGTAAACACAAAGATATTAGT |
| | | ACAAAATACGTGACGTAGAAAGTAATAATTTCTTGGGTAGTTTGCAGTTTTAAAATTA |
| | | TGTTTTAAAATGGACTATCATATGCTTACCGTAACTTGAAAGTATTTCGATTTCTTGGCT |
| | | TTATATATCTTGTGGAAAGGACGAAACACCTAAATTTCTACTGTTGTAGATCAGGAGG |
| | | AAGCGATGGCTTCAGGGCCGGCATGGTCCCAGCCTCCTCGCTGGCGCCGGCTGGGCA |
| | | ACATGCTTCGGCATGGCGAATGGGAC (SEQ ID NO: 986) |
| ID407 | RUNX1 | AAGGTCGGGCAGGAAGAGGGCCTATTTCCCATGATTCCTTCATATTTGCATATACGAT |
| | | ACAAGGCTGTTAGAGAGATAATTAGAATTAATTTGACTGTAAACACAAAGATATTAGT |
| | | ACAAAATACGTGACGTAGAAAGTAATAATTTCTTGGGTAGTTTGCAGTTTTAAAATTA |
| | | TGTTTTAAAATGGACTATCATATGCTTACCGTAACTTGAAAGTATTTCGATTTCTTGGCT |
| | | TTATATATCTTGTGGAAAGGACGAAACACCAAAATTTCTACTATTGTAGATCAGGAGG |
| | | AAGCGATGGCTTCAGGGCCGGCATGGTCCCAGCCTCCTCGCTGGCGCCGGCTGGGCA |
| | | ACATGCTTCGGCATGGCGAATGGGAC (SEQ ID NO: 984) |
| ID408 | RUNX1 | AAGGTCGGGCAGGAAGAGGGCCTATTTCCCATGATTCCTTCATATTTGCATATACGAT |
| | | ACAAGGCTGTTAGAGAGATAATTAGAATTAATTTGACTGTAAACACAAAGATATTAGT |
| | | ACAAAATACGTGACGTAGAAAGTAATAATTTCTTGGGTAGTTTGCAGTTTTAAAATTA |
| | | TGTTTTAAAATGGACTATCATATGCTTACCGTAACTTGAAAGTATTTCGATTTCTTGGCT |
| | | TTATATATCTTGTGGAAAGGACGAAACACCAAAATTTCTGCTATTGCAGATCAGGAGG |
| | | AAGCGATGGCTTCAGGGCCGGCATGGTCCCAGCCTCCTCGCTGGCGCCGGCTGGGCA |
| | | ACATGCTTCGGCATGGCGAATGGGAC (SEQ ID NO: 987) |
| ID409 | RUNX1_T1 | AAGGTCGGGCAGGAAGAGGGCCTATTTCCCATGATTCCTTCATATTTGCATATACGAT |
| | | ACAAGGCTGTTAGAGAGATAATTAGAATTAATTTGACTGTAAACACAAAGATATTAGT |
| | | ACAAAATACGTGACGTAGAAAGTAATAATTTCTTGGGTAGTTTGCAGTTTTAAAATTA |
| | | TGTTTTAAAATGGACTATCATATGCTTACCGTAACTTGAAAGTATTTCGATTTCTTGGCT |
| | | TTATATATCTTGTGGAAAGGACGAAACACCTAAATTTCTACTATTGTAGATAGCTTTGC |
| | | CTGTAATGAAATGGCGGCCGGCATGGTCCCAGCCTCCTCGCTGGCGCCGGCTGGGCA |
| | | ACATGCTTCGGCATGGCGAATGGGAC (SEQ ID NO: 988) |
| ID409 | RUNX1_T2 | AAGGTCGGGCAGGAAGAGGGCCTATTTCCCATGATTCCTTCATATTTGCATATACGAT |
| | | ACAAGGCTGTTAGAGAGATAATTAGAATTAATTTGACTGTAAACACAAAGATATTAGT |
| | | ACAAAATACGTGACGTAGAAAGTAATAATTTCTTGGGTAGTTTGCAGTTTTAAAATTA |
| | | TGTTTTAAAATGGACTATCATATGCTTACCGTAACTTGAAAGTATTTCGATTTCTTGGCT |
| | | TTATATATCTTGTGGAAAGGACGAAACACCTAAATTTCTACTATTGTAGATGGTGCAG |
| | | AGATGCCTCGGTGCCTGGCCGGCATGGTCCCAGCCTCCTCGCTGGCGCCGGCTGGGC |
| | | AACATGCTTCGGCATGGCGAATGGGAC (SEQ ID NO: 989) |
| ID410 | RUNX1 | AAGGTCGGGCAGGAAGAGGGCCTATTTCCCATGATTCCTTCATATTTGCATATACGAT |
| | | ACAAGGCTGTTAGAGAGATAATTAGAATTAATTTGACTGTAAACACAAAGATATTAGT |
| | | ACAAAATACGTGACGTAGAAAGTAATAATTTCTTGGGTAGTTTGCAGTTTTAAAATTA |
| | | TGTTTTAAAATGGACTATCATATGCTTACCGTAACTTGAAAGTATTTCGATTTCTTGGCT |
| | | TTATATATCTTGTGGAAAGGACGAAACACCATAATTTCTACTATCGTAGATCAGGAGG |
| | | AAGCGATGGCTTCAGGGCCGGCATGGTCCCAGCCTCCTCGCTGGCGCCGGCTGGGCA |
| | | ACATGCTTCGGCATGGCGAATGGGAC (SEQ ID NO: 990) |
| ID411 | RUNX1 | AAGGTCGGGCAGGAAGAGGGCCTATTTCCCATGATTCCTTCATATTTGCATATACGAT |
| | | ACAAGGCTGTTAGAGAGATAATTAGAATTAATTTGACTGTAAACACAAAGATATTAGT |
| | | ACAAAATACGTGACGTAGAAAGTAATAATTTCTTGGGTAGTTTGCAGTTTTAAAATTA |
| | | TGTTTTAAAATGGACTATCATATGCTTACCGTAACTTGAAAGTATTTCGATTTCTTGGCT |
| | | TTATATATCTTGTGGAAAGGACGAAACACCTAAATTTCTACTGTTGTAGATCAGGAGG |
| | | AAGCGATGGCTTCAGGGCCGGCATGGTCCCAGCCTCCTCGCTGGCGCCGGCTGGGCA |
| | | ACATGCTTCGGCATGGCGAATGGGAC (SEQ ID NO: 986) |
| ID412 | RUNX1 | AAGGTCGGGCAGGAAGAGGGCCTATTTCCCATGATTCCTTCATATTTGCATATACGAT |
| | | ACAAGGCTGTTAGAGAGATAATTAGAATTAATTTGACTGTAAACACAAAGATATTAGT |
| | | ACAAAATACGTGACGTAGAAAGTAATAATTTCTTGGGTAGTTTGCAGTTTTAAAATTA |
| | | TGTTTTAAAATGGACTATCATATGCTTACCGTAACTTGAAAGTATTTCGATTTCTTGGCT |
| | | TTATATATCTTGTGGAAAGGACGAAACACCTTAATTTCTACTATTGTAGATCAGGAGG |
| | | AAGCGATGGCTTCAGGGCCGGCATGGTCCCAGCCTCCTCGCTGGCGCCGGCTGGGCA |
| | | ACATGCTTCGGCATGGCGAATGGGAC (SEQ ID NO: 991) |
| ID413 | RUNX1 | AAGGTCGGGCAGGAAGAGGGCCTATTTCCCATGATTCCTTCATATTTGCATATACGAT |
| | | ACAAGGCTGTTAGAGAGATAATTAGAATTAATTTGACTGTAAACACAAAGATATTAGT |
| | | ACAAAATACGTGACGTAGAAAGTAATAATTTCTTGGGTAGTTTGCAGTTTTAAAATTA |
| | | TGTTTTAAAATGGACTATCATATGCTTACCGTAACTTGAAAGTATTTCGATTTCTTGGCT |
| | | TTATATATCTTGTGGAAAGGACGAAACACCATAATTTCTACTATTGTAGATCAGGAGG |
| | | AAGCGATGGCTTCAGGGCCGGCATGGTCCCAGCCTCCTCGCTGGCGCCGGCTGGGCA |
| | | ACATGCTTCGGCATGGCGAATGGGAC (SEQ ID NO: 992) |
| ID414 | RUNX1 | AAGGTCGGGCAGGAAGAGGGCCTATTTCCCATGATTCCTTCATATTTGCATATACGAT |
| | | ACAAGGCTGTTAGAGAGATAATTAGAATTAATTTGACTGTAAACACAAAGATATTAGT |
| | | ACAAAATACGTGACGTAGAAAGTAATAATTTCTTGGGTAGTTTGCAGTTTTAAAATTA |
| | | TGTTTTAAAATGGACTATCATATGCTTACCGTAACTTGAAAGTATTTCGATTTCTTGGCT |
| | | TTATATATCTTGTGGAAAGGACGAAACACCATAATTTCTACTGTTGTAGATCAGGAGG |
| | | AAGCGATGGCTTCAGGGCCGGCATGGTCCCAGCCTCCTCGCTGGCGCCGGCTGGGCA |
| | | ACATGCTTCGGCATGGCGAATGGGAC (SEQ ID NO: 993) |
| ID415 | RUNX1 | AAGGTCGGGCAGGAAGAGGGCCTATTTCCCATGATTCCTTCATATTTGCATATACGAT |
| | | ACAAGGCTGTTAGAGAGATAATTAGAATTAATTTGACTGTAAACACAAAGATATTAGT |
| | | ACAAAATACGTGACGTAGAAAGTAATAATTTCTTGGGTAGTTTGCAGTTTTAAAATTA |
| | | TGTTTTAAAATGGACTATCATATGCTTACCGTAACTTGAAAGTATTTCGATTTCTTGGCT |
| | | TTATATATCTTGTGGAAAGGACGAAACACCTTAATTTCTACTCTCGTAGATCAGGAGG |
| | | AAGCGATGGCTTCAGGGCCGGCATGGTCCCAGCCTCCTCGCTGGCGCCGGCTGGGCA |
| | | ACATGCTTCGGCATGGCGAATGGGAC (SEQ ID NO: 994) |
| ID416 | RUNX1_T1 | AAGGTCGGGCAGGAAGAGGGCCTATTTCCCATGATTCCTTCATATTTGCATATACGAT |
| | | ACAAGGCTGTTAGAGAGATAATTAGAATTAATTTGACTGTAAACACAAAGATATTAGT |
| | | ACAAAATACGTGACGTAGAAAGTAATAATTTCTTGGGTAGTTTGCAGTTTTAAAATTA |
| | | TGTTTTAAAATGGACTATCATATGCTTACCGTAACTTGAAAGTATTTCGATTTCTTGGCT |
| | | TTATATATCTTGTGGAAAGGACGAAACACCATAATTTCTACTATCGTAGATTTTTTACA |
| | | AAGGTGCATTTTTTAGGCCGGCATGGTCCCAGCCTCCTCGCTGGCGCCGGCTGGGCAA |
| | | CATGCTTCGGCATGGCGAATGGGAC (SEQ ID NO: 995) |
| ID416 | RUNX1_T2 | AAGGTCGGGCAGGAAGAGGGCCTATTTCCCATGATTCCTTCATATTTGCATATACGAT |
| | | ACAAGGCTGTTAGAGAGATAATTAGAATTAATTTGACTGTAAACACAAAGATATTAGT |
| | | ACAAAATACGTGACGTAGAAAGTAATAATTTCTTGGGTAGTTTGCAGTTTTAAAATTA |
| | | TGTTTTAAAATGGACTATCATATGCTTACCGTAACTTGAAAGTATTTCGATTTCTTGGCT |
| | | TTATATATCTTGTGGAAAGGACGAAACACCATAATTTCTACTATCGTAGATCTCAGCTT |
| | | TGCCTGTAATGAAATGGCCGGCATGGTCCCAGCCTCCTCGCTGGCGCCGGCTGGGCA |
| | | ACATGCTTCGGCATGGCGAATGGGAC (SEQ ID NO: 996) |
| ID417 | RUNX1 | AAGGTCGGGCAGGAAGAGGGCCTATTTCCCATGATTCCTTCATATTTGCATATACGAT |
| | | ACAAGGCTGTTAGAGAGATAATTAGAATTAATTTGACTGTAAACACAAAGATATTAGT |
| | | ACAAAATACGTGACGTAGAAAGTAATAATTTCTTGGGTAGTTTGCAGTTTTAAAATTA |
| | | TGTTTTAAAATGGACTATCATATGCTTACCGTAACTTGAAAGTATTTCGATTTCTTGGCT |
| | | TTATATATCTTGTGGAAAGGACGAAACACCTAAATTTCTACTGTTGTAGATCAGGAGG |
| | | AAGCGATGGCTTCAGGGCCGGCATGGTCCCAGCCTCCTCGCTGGCGCCGGCTGGGCA |
| | | ACATGCTTCGGCATGGCGAATGGGAC (SEQ ID NO: 986) |
| ID418 | RUNX1 | AAGGTCGGGCAGGAAGAGGGCCTATTTCCCATGATTCCTTCATATTTGCATATACGAT |
| | | ACAAGGCTGTTAGAGAGATAATTAGAATTAATTTGACTGTAAACACAAAGATATTAGT |
| | | ACAAAATACGTGACGTAGAAAGTAATAATTTCTTGGGTAGTTTGCAGTTTTAAAATTA |
| | | TGTTTTAAAATGGACTATCATATGCTTACCGTAACTTGAAAGTATTTCGATTTCTTGGCT |
| | | TTATATATCTTGTGGAAAGGACGAAACACCTAAATTTCTACTATTGTAGATCAGGAGG |
| | | AAGCGATGGCTTCAGGGCCGGCATGGTCCCAGCCTCCTCGCTGGCGCCGGCTGGGCA |
| | | ACATGCTTCGGCATGGCGAATGGGAC (SEQ ID NO: 997) |
| ID419 | RUNX1 | AAGGTCGGGCAGGAAGAGGGCCTATTTCCCATGATTCCTTCATATTTGCATATACGAT |
| | | ACAAGGCTGTTAGAGAGATAATTAGAATTAATTTGACTGTAAACACAAAGATATTAGT |
| | | ACAAAATACGTGACGTAGAAAGTAATAATTTCTTGGGTAGTTTGCAGTTTTAAAATTA |
| | | TGTTTTAAAATGGACTATCATATGCTTACCGTAACTTGAAAGTATTTCGATTTCTTGGCT |
| | | TTATATATCTTGTGGAAAGGACGAAACACCAGAATTTCTACTGTTGTAGATCAGGAGG |
| | | AAGCGATGGCTTCAGGGCCGGCATGGTCCCAGCCTCCTCGCTGGCGCCGGCTGGGCA |
| | | ACATGCTTCGGCATGGCGAATGGGAC (SEQ ID NO: 982) |
| ID420 | RUNX1 | AAGGTCGGGCAGGAAGAGGGCCTATTTCCCATGATTCCTTCATATTTGCATATACGAT |
| | | ACAAGGCTGTTAGAGAGATAATTAGAATTAATTTGACTGTAAACACAAAGATATTAGT |
| | | ACAAAATACGTGACGTAGAAAGTAATAATTTCTTGGGTAGTTTGCAGTTTTAAAATTA |
| | | TGTTTTAAAATGGACTATCATATGCTTACCGTAACTTGAAAGTATTTCGATTTCTTGGCT |
| | | TTATATATCTTGTGGAAAGGACGAAACACCATAATTTCTACTATTGTAGATCAGGAGG |
| | | AAGCGATGGCTTCAGGGCCGGCATGGTCCCAGCCTCCTCGCTGGCGCCGGCTGGGCA |
| | | ACATGCTTCGGCATGGCGAATGGGAC (SEQ ID NO: 992) |
| ID421 | RUNX1 | AAGGTCGGGCAGGAAGAGGGCCTATTTCCCATGATTCCTTCATATTTGCATATACGAT |
| | | ACAAGGCTGTTAGAGAGATAATTAGAATTAATTTGACTGTAAACACAAAGATATTAGT |
| | | ACAAAATACGTGACGTAGAAAGTAATAATTTCTTGGGTAGTTTGCAGTTTTAAAATTA |
| | | TGTTTTAAAATGGACTATCATATGCTTACCGTAACTTGAAAGTATTTCGATTTCTTGGCT |
| | | TTATATATCTTGTGGAAAGGACGAAACACCATAATTTCTACTATTGTAGATCAGGAGG |
| | | AAGCGATGGCTTCAGGGCCGGCATGGTCCCAGCCTCCTCGCTGGCGCCGGCTGGGCA |
| | | ACATGCTTCGGCATGGCGAATGGGAC (SEQ ID NO: 992) |
| ID422 | RUNX1 | AAGGTCGGGCAGGAAGAGGGCCTATTTCCCATGATTCCTTCATATTTGCATATACGAT |
| | | ACAAGGCTGTTAGAGAGATAATTAGAATTAATTTGACTGTAAACACAAAGATATTAGT |
| | | ACAAAATACGTGACGTAGAAAGTAATAATTTCTTGGGTAGTTTGCAGTTTTAAAATTA |
| | | TGTTTTAAAATGGACTATCATATGCTTACCGTAACTTGAAAGTATTTCGATTTCTTGGCT |
| | | TTATATATCTTGTGGAAAGGACGAAACACCAAAATTTCTACTATTGTAGATCAGGAGG |
| | | AAGCGATGGCTTCAGGGCCGGCATGGTCCCAGCCTCCTCGCTGGCGCCGGCTGGGCA |
| | | ACATGCTTCGGCATGGCGAATGGGAC (SEQ ID NO: 984) |
| ID423 | RUNX1_T1 | AAGGTCGGGCAGGAAGAGGGCCTATTTCCCATGATTCCTTCATATTTGCATATACGAT |
| | | ACAAGGCTGTTAGAGAGATAATTAGAATTAATTTGACTGTAAACACAAAGATATTAGT |
| | | ACAAAATACGTGACGTAGAAAGTAATAATTTCTTGGGTAGTTTGCAGTTTTAAAATTA |
| | | TGTTTTAAAATGGACTATCATATGCTTACCGTAACTTGAAAGTATTTCGATTTCTTGGCT |
| | | TTATATATCTTGTGGAAAGGACGAAACACCGAAATTTCTACTATCGTAGATAGACAGC |
| | | ATATTTGAGTCATTTCGGCCGGCATGGTCCCAGCCTCCTCGCTGGCGCCGGCTGGGCA |
| | | ACATGCTTCGGCATGGCGAATGGGAC (SEQ ID NO: 998) |
| ID423 | RUNX1_T2 | AAGGTCGGGCAGGAAGAGGGCCTATTTCCCATGATTCCTTCATATTTGCATATACGAT |
| | | ACAAGGCTGTTAGAGAGATAATTAGAATTAATTTGACTGTAAACACAAAGATATTAGT |
| | | ACAAAATACGTGACGTAGAAAGTAATAATTTCTTGGGTAGTTTGCAGTTTTAAAATTA |
| | | TGTTTTAAAATGGACTATCATATGCTTACCGTAACTTGAAAGTATTTCGATTTCTTGGCT |
| | | TTATATATCTTGTGGAAAGGACGAAACACCGAAATTTCTACTATCGTAGATACCTCGG |
| | | TGCAGAGATGCCTCGGGGCCGGCATGGTCCCAGCCTCCTCGCTGGCGCCGGCTGGGC |
| | | AACATGCTTCGGCATGGCGAATGGGAC (SEQ ID NO: 999) |
| ID424 | RUNX1 | AAGGTCGGGCAGGAAGAGGGCCTATTTCCCATGATTCCTTCATATTTGCATATACGAT |
| | | ACAAGGCTGTTAGAGAGATAATTAGAATTAATTTGACTGTAAACACAAAGATATTAGT |
| | | ACAAAATACGTGACGTAGAAAGTAATAATTTCTTGGGTAGTTTGCAGTTTTAAAATTA |
| | | TGTTTTAAAATGGACTATCATATGCTTACCGTAACTTGAAAGTATTTCGATTTCTTGGCT |
| | | TTATATATCTTGTGGAAAGGACGAAACACCATAATTTCTACTATTGTAGATCAGGAGG |
| | | AAGCGATGGCTTCAGGGCCGGCATGGTCCCAGCCTCCTCGCTGGCGCCGGCTGGGCA |
| | | ACATGCTTCGGCATGGCGAATGGGAC (SEQ ID NO: 992) |
| ID425 | RUNX1 | AAGGTCGGGCAGGAAGAGGGCCTATTTCCCATGATTCCTTCATATTTGCATATACGAT |
| | | ACAAGGCTGTTAGAGAGATAATTAGAATTAATTTGACTGTAAACACAAAGATATTAGT |
| | | ACAAAATACGTGACGTAGAAAGTAATAATTTCTTGGGTAGTTTGCAGTTTTAAAATTA |
| | | TGTTTTAAAATGGACTATCATATGCTTACCGTAACTTGAAAGTATTTCGATTTCTTGGCT |
| | | TTATATATCTTGTGGAAAGGACGAAACACCTAAATTTCTACTATTGTAGATCAGGAGG |
| | | AAGCGATGGCTTCAGGGCCGGCATGGTCCCAGCCTCCTCGCTGGCGCCGGCTGGGCA |
| | | ACATGCTTCGGCATGGCGAATGGGAC (SEQ ID NO: 997) |
| ID426 | RUNX1 | AAGGTCGGGCAGGAAGAGGGCCTATTTCCCATGATTCCTTCATATTTGCATATACGAT |
| | | ACAAGGCTGTTAGAGAGATAATTAGAATTAATTTGACTGTAAACACAAAGATATTAGT |
| | | ACAAAATACGTGACGTAGAAAGTAATAATTTCTTGGGTAGTTTGCAGTTTTAAAATTA |
| | | TGTTTTAAAATGGACTATCATATGCTTACCGTAACTTGAAAGTATTTCGATTTCTTGGCT |
| | | TTATATATCTTGTGGAAAGGACGAAACACCTCAATTTCTACTGTTGTAGATCAGGAGG |
| | | AAGCGATGGCTTCAGGGCCGGCATGGTCCCAGCCTCCTCGCTGGCGCCGGCTGGGCA |
| | | ACATGCTTCGGCATGGCGAATGGGAC (SEQ ID NO: 1000) |
| ID427 | RUNX1 | AAGGTCGGGCAGGAAGAGGGCCTATTTCCCATGATTCCTTCATATTTGCATATACGAT |
| | | ACAAGGCTGTTAGAGAGATAATTAGAATTAATTTGACTGTAAACACAAAGATATTAGT |
| | | ACAAAATACGTGACGTAGAAAGTAATAATTTCTTGGGTAGTTTGCAGTTTTAAAATTA |
| | | TGTTTTAAAATGGACTATCATATGCTTACCGTAACTTGAAAGTATTTCGATTTCTTGGCT |
| | | TTATATATCTTGTGGAAAGGACGAAACACCAAAATTTCTACTATTGTAGATCAGGAGG |
| | | AAGCGATGGCTTCAGGGCCGGCATGGTCCCAGCCTCCTCGCTGGCGCCGGCTGGGCA |
| | | ACATGCTTCGGCATGGCGAATGGGAC (SEQ ID NO: 984) |
| ID428 | RUNX1 | AAGGTCGGGCAGGAAGAGGGCCTATTTCCCATGATTCCTTCATATTTGCATATACGAT |
| | | ACAAGGCTGTTAGAGAGATAATTAGAATTAATTTGACTGTAAACACAAAGATATTAGT |
| | | ACAAAATACGTGACGTAGAAAGTAATAATTTCTTGGGTAGTTTGCAGTTTTAAAATTA |
| | | TGTTTTAAAATGGACTATCATATGCTTACCGTAACTTGAAAGTATTTCGATTTCTTGGCT |
| | | TTATATATCTTGTGGAAAGGACGAAACACCTAAATTTCTACTATTGTAGATCAGGAGG |
| | | AAGCGATGGCTTCAGGGCCGGCATGGTCCCAGCCTCCTCGCTGGCGCCGGCTGGGCA |
| | | ACATGCTTCGGCATGGCGAATGGGAC (SEQ ID NO: 997) |
| ID429 | RUNX1 | AAGGTCGGGCAGGAAGAGGGCCTATTTCCCATGATTCCTTCATATTTGCATATACGAT |
| | | ACAAGGCTGTTAGAGAGATAATTAGAATTAATTTGACTGTAAACACAAAGATATTAGT |
| | | ACAAAATACGTGACGTAGAAAGTAATAATTTCTTGGGTAGTTTGCAGTTTTAAAATTA |
| | | TGTTTTAAAATGGACTATCATATGCTTACCGTAACTTGAAAGTATTTCGATTTCTTGGCT |
| | | TTATATATCTTGTGGAAAGGACGAAACACCATAATTTCTACTGTTGTAGATCAGGAGG |
| | | AAGCGATGGCTTCAGGGCCGGCATGGTCCCAGCCTCCTCGCTGGCGCCGGCTGGGCA |
| | | ACATGCTTCGGCATGGCGAATGGGAC (SEQ ID NO: 993) |
| ID432 | RUNX1 | AAGGTCGGGCAGGAAGAGGGCCTATTTCCCATGATTCCTTCATATTTGCATATACGAT |
| | | ACAAGGCTGTTAGAGAGATAATTAGAATTAATTTGACTGTAAACACAAAGATATTAGT |
| | | ACAAAATACGTGACGTAGAAAGTAATAATTTCTTGGGTAGTTTGCAGTTTTAAAATTA |
| | | TGTTTTAAAATGGACTATCATATGCTTACCGTAACTTGAAAGTATTTCGATTTCTTGGCT |
| | | TTATATATCTTGTGGAAAGGACGAAACACCATAATTTCTACTGTTGTAGATCAGGAGG |
| | | AAGCGATGGCTTCAGGGCCGGCATGGTCCCAGCCTCCTCGCTGGCGCCGGCTGGGCA |
| | | ACATGCTTCGGCATGGCGAATGGGAC (SEQ ID NO: 993) |
| ID433 | RUNX1_T1 | AAGGTCGGGCAGGAAGAGGGCCTATTTCCCATGATTCCTTCATATTTGCATATACGAT |
| | | ACAAGGCTGTTAGAGAGATAATTAGAATTAATTTGACTGTAAACACAAAGATATTAGT |
| | | ACAAAATACGTGACGTAGAAAGTAATAATTTCTTGGGTAGTTTGCAGTTTTAAAATTA |
| | | TGTITTAAAATGGACTATCATATGCTTACCGTAACTTGAAAGTATTTCGATTTCTTGGCT |
| | | TTATATATCTTGTGGAAAGGACGAAACACCAAAATTTCTGCTATTGCAGATAGCTTTGC |
| | | CTGTAATGAAATGGCGGCCGGCATGGTCCCAGCCTCCTCGCTGGCGCCGGCTGGGCA |
| | | ACATGCTTCGGCATGGCGAATGGGAC (SEQ ID NO: 1001) |
| ID433 | RUNX1_T2 | AAGGTCGGGCAGGAAGAGGGCCTATTTCCCATGATTCCTTCATATTTGCATATACGAT |
| | | ACAAGGCTGTTAGAGAGATAATTAGAATTAATTTGACTGTAAACACAAAGATATTAGT |
| | | ACAAAATACGTGACGTAGAAAGTAATAATTTCTTGGGTAGTTTGCAGTTTTAAAATTA |
| | | TGTTTTAAAATGGACTATCATATGCTTACCGTAACTTGAAAGTATTTCGATTTCTTGGCT |
| | | TTATATATCTTGTGGAAAGGACGAAACACCAAAATTTCTGCTATTGCAGATGGTGCAG |
| | | AGATGCCTCGGTGCCTGGCCGGCATGGTCCCAGCCTCCTCGCTGGCGCCGGCTGGGC |
| | | AACATGCTTCGGCATGGCGAATGGGAC (SEQ ID NO: 1002) |
| LbaCas12a | SCN1A | AAGGTCGGGCAGGAAGAGGGCCTATTTCCCATGATTCCTTCATATTTGCATATACGAT |
| | | ACAAGGCTGTTAGAGAGATAATTAGAATTAATTTGACTGTAAACACAAAGATATTAGT |
| | | ACAAAATACGTGACGTAGAAAGTAATAATTTCTTGGGTAGTTTGCAGTTTTAAAATTA |
| | | TGTTTTAAAATGGACTATCATATGCTTACCGTAACTTGAAAGTATTTCGATTTCTTGGCT |
| | | TTATATATCTTGTGGAAAGGACGAAACACCTAATTTCTACTAAGTGTAGATCTCCATCT |
| | | TGTCATCCTGCAGGCCGGCATGGTCCCAGCCTCCTCGCTGGCGCCGGCTGGGCAACAT |
| | | GCTTCGGCATGGCGAATGGGAC (SEQ ID NO: 1003) |
| ID401 | SCN1A | AAGGTCGGGCAGGAAGAGGGCCTATTTCCCATGATTCCTTCATATTTGCATATACGAT |
| | | ACAAGGCTGTTAGAGAGATAATTAGAATTAATTTGACTGTAAACACAAAGATATTAGT |
| | | ACAAAATACGTGACGTAGAAAGTAATAATTTCTTGGGTAGTTTGCAGTTTTAAAATTA |
| | | TGTTTTAAAATGGACTATCATATGCTTACCGTAACTTGAAAGTATTTCGATTTCTTGGCT |
| | | TTATATATCTTGTGGAAAGGACGAAACACCAGAATTTCTACTGTTGTAGATCTCCATCT |
| | | TGTCATCCTGCAGGCCGGCATGGTCCCAGCCTCCTCGCTGGCGCCGGCTGGGCAACAT |
| | | GCTTCGGCATGGCGAATGGGAC (SEQ ID NO: 1004) |
| ID402 | SCN1A | AAGGTCGGGCAGGAAGAGGGCCTATTTCCCATGATTCCTTCATATTTGCATATACGAT |
| | | ACAAGGCTGTTAGAGAGATAATTAGAATTAATTTGACTGTAAACACAAAGATATTAGT |
| | | ACAAAATACGTGACGTAGAAAGTAATAATTTCTTGGGTAGTTTGCAGTTTTAAAATTA |
| | | TGTTTTAAAATGGACTATCATATGCTTACCGTAACTTGAAAGTATTTCGATTTCTTGGCT |
| | | TTATATATCTTGTGGAAAGGACGAAACACCAAAATTTCTACTCTTGTAGATCTCCATCT |
| | | TGTCATCCTGCAGGCCGGCATGGTCCCAGCCTCCTCGCTGGCGCCGGCTGGGCAACAT |
| | | GCTTCGGCATGGCGAATGGGAC (SEQ ID NO: 1005) |
| ID403 | SCN1A | AAGGTCGGGCAGGAAGAGGGCCTATTTCCCATGATTCCTTCATATTTGCATATACGAT |
| | | ACAAGGCTGTTAGAGAGATAATTAGAATTAATTTGACTGTAAACACAAAGATATTAGT |
| | | ACAAAATACGTGACGTAGAAAGTAATAATTTCTTGGGTAGTTTGCAGTTTTAAAATTA |
| | | TGTTTTAAAATGGACTATCATATGCTTACCGTAACTTGAAAGTATTTCGATTTCTTGGCT |
| | | TTATATATCTTGTGGAAAGGACGAAACACCAAAATTTCTACTATTGTAGATCTCCATCT |
| | | TGTCATCCTGCAGGCCGGCATGGTCCCAGCCTCCTCGCTGGCGCCGGCTGGGCAACAT |
| | | GCTTCGGCATGGCGAATGGGAC (SEQ ID NO: 1006) |
| ID404 | SCN1A | AAGGTCGGGCAGGAAGAGGGCCTATTTCCCATGATTCCTTCATATTTGCATATACGAT |
| | | ACAAGGCTGTTAGAGAGATAATTAGAATTAATTTGACTGTAAACACAAAGATATTAGT |
| | | ACAAAATACGTGACGTAGAAAGTAATAATTTCTTGGGTAGTTTGCAGTTTTAAAATTA |
| | | TGTTTTAAAATGGACTATCATATGCTTACCGTAACTTGAAAGTATTTCGATTTCTTGGCT |
| | | TTATATATCTTGTGGAAAGGACGAAACACCAAAATTTCTACTCTTGTAGATCTCCATCT |
| | | TGTCATCCTGCAGGCCGGCATGGTCCCAGCCTCCTCGCTGGCGCCGGCTGGGCAACAT |
| | | GCTTCGGCATGGCGAATGGGAC (SEQ ID NO: 1005) |
| ID405 | SCN1A | AAGGTCGGGCAGGAAGAGGGCCTATTTCCCATGATTCCTTCATATTTGCATATACGAT |
| | | ACAAGGCTGTTAGAGAGATAATTAGAATTAATTTGACTGTAAACACAAAGATATTAGT |
| | | ACAAAATACGTGACGTAGAAAGTAATAATTTCTTGGGTAGTTTGCAGTTTTAAAATTA |
| | | TGTTTTAAAATGGACTATCATATGCTTACCGTAACTTGAAAGTATTTCGATTTCTTGGCT |
| | | TTATATATCTTGTGGAAAGGACGAAACACCTGAATTTCTACTGTTGTAGATCTCCATCT |
| | | TGTCATCCTGCAGGCCGGCATGGTCCCAGCCTCCTCGCTGGCGCCGGCTGGGCAACAT |
| | | GCTTCGGCATGGCGAATGGGAC (SEQ ID NO: 1007) |
| ID406 | SCN1A | AAGGTCGGGCAGGAAGAGGGCCTATTTCCCATGATTCCTTCATATTTGCATATACGAT |
| | | ACAAGGCTGTTAGAGAGATAATTAGAATTAATTTGACTGTAAACACAAAGATATTAGT |
| | | ACAAAATACGTGACGTAGAAAGTAATAATTTCTTGGGTAGTTTGCAGTTTTAAAATTA |
| | | TGTTTTAAAATGGACTATCATATGCTTACCGTAACTTGAAAGTATTTCGATTTCTTGGCT |
| | | TTATATATCTTGTGGAAAGGACGAAACACCTAAATTTCTACTGTTGTAGATCTCCATCT |
| | | TGTCATCCTGCAGGCCGGCATGGTCCCAGCCTCCTCGCTGGCGCCGGCTGGGCAACAT |
| | | GCTTCGGCATGGCGAATGGGAC (SEQ ID NO: 1008) |
| ID407 | SCN1A | AAGGTCGGGCAGGAAGAGGGCCTATTTCCCATGATTCCTTCATATTTGCATATACGAT |
| | | ACAAGGCTGTTAGAGAGATAATTAGAATTAATTTGACTGTAAACACAAAGATATTAGT |
| | | ACAAAATACGTGACGTAGAAAGTAATAATTTCTTGGGTAGTTTGCAGTTTTAAAATTA |
| | | TGTTTTAAAATGGACTATCATATGCTTACCGTAACTTGAAAGTATTTCGATTTCTTGGCT |
| | | TTATATATCTTGTGGAAAGGACGAAACACCAAAATTTCTACTATTGTAGATCTCCATCT |
| | | TGTCATCCTGCAGGCCGGCATGGTCCCAGCCTCCTCGCTGGCGCCGGCTGGGCAACAT |
| | | GCTTCGGCATGGCGAATGGGAC (SEQ ID NO: 1006) |
| ID408 | SCN1A | AAGGTCGGGCAGGAAGAGGGCCTATTTCCCATGATTCCTTCATATTTGCATATACGAT |
| | | ACAAGGCTGTTAGAGAGATAATTAGAATTAATTTGACTGTAAACACAAAGATATTAGT |
| | | ACAAAATACGTGACGTAGAAAGTAATAATTTCTTGGGTAGTTTGCAGTTTTAAAATTA |
| | | TGTTTTAAAATGGACTATCATATGCTTACCGTAACTTGAAAGTATTTCGATTTCTTGGCT |
| | | TTATATATCTTGTGGAAAGGACGAAACACCAAAATTTCTGCTATTGCAGATCTCCATCT |
| | | TGTCATCCTGCAGGCCGGCATGGTCCCAGCCTCCTCGCTGGCGCCGGCTGGGCAACAT |
| | | GCTTCGGCATGGCGAATGGGAC (SEQ ID NO: 1009) |
| ID409 | SCN1A_T1 | AAGGTCGGGCAGGAAGAGGGCCTATTTCCCATGATTCCTTCATATTTGCATATACGAT |
| | | ACAAGGCTGTTAGAGAGATAATTAGAATTAATTTGACTGTAAACACAAAGATATTAGT |
| | | ACAAAATACGTGACGTAGAAAGTAATAATTTCTTGGGTAGTTTGCAGTTTTAAAATTA |
| | | TGTTTTAAAATGGACTATCATATGCTTACCGTAACTTGAAAGTATTTCGATTTCTTGGCT |
| | | TTATATATCTTGTGGAAAGGACGAAACACCTAAATTTCTACTATTGTAGATTGGTGAA |
| | | GAAGTTGAAGCTGTCAGGCCGGCATGGTCCCAGCCTCCTCGCTGGCGCCGGCTGGGC |
| | | AACATGCTTCGGCATGGCGAATGGGAC (SEQ ID NO: 1010) |
| ID409 | SCN1A_T2 | AAGGTCGGGCAGGAAGAGGGCCTATTTCCCATGATTCCTTCATATTTGCATATACGAT |
| | | ACAAGGCTGTTAGAGAGATAATTAGAATTAATTTGACTGTAAACACAAAGATATTAGT |
| | | ACAAAATACGTGACGTAGAAAGTAATAATTTCTTGGGTAGTTTGCAGTTTTAAAATTA |
| | | TGTTTTAAAATGGACTATCATATGCTTACCGTAACTTGAAAGTATTTCGATTTCTTGGCT |
| | | TTATATATCTTGTGGAAAGGACGAAACACCTAAATTTCTACTATTGTAGATCATCTTGT |
| | | CATCCTGCACATTTTGGCCGGCATGGTCCCAGCCTCCTCGCTGGCGCCGGCTGGGCAA |
| | | CATGCTTCGGCATGGCGAATGGGAC (SEQ ID NO: 1011) |
| ID410 | SCN1A | AAGGTCGGGCAGGAAGAGGGCCTATTTCCCATGATTCCTTCATATTTGCATATACGAT |
| | | ACAAGGCTGTTAGAGAGATAATTAGAATTAATTTGACTGTAAACACAAAGATATTAGT |
| | | ACAAAATACGTGACGTAGAAAGTAATAATTTCTTGGGTAGTTTGCAGTTTTAAAATTA |
| | | TGTTTTAAAATGGACTATCATATGCTTACCGTAACTTGAAAGTATTTCGATTTCTTGGCT |
| | | TTATATATCTTGTGGAAAGGACGAAACACCATAATTTCTACTATCGTAGATCTCCATCT |
| | | TGTCATCCTGCAGGCCGGCATGGTCCCAGCCTCCTCGCTGGCGCCGGCTGGGCAACAT |
| | | GCTTCGGCATGGCGAATGGGAC (SEQ ID NO: 1012) |
| ID411 | SCN1A | AAGGTCGGGCAGGAAGAGGGCCTATTTCCCATGATTCCTTCATATTTGCATATACGAT |
| | | ACAAGGCTGTTAGAGAGATAATTAGAATTAATTTGACTGTAAACACAAAGATATTAGT |
| | | ACAAAATACGTGACGTAGAAAGTAATAATTTCTTGGGTAGTTTGCAGTTTTAAAATTA |
| | | TGTTTTAAAATGGACTATCATATGCTTACCGTAACTTGAAAGTATTTCGATTTCTTGGCT |
| | | TTATATATCTTGTGGAAAGGACGAAACACCTAAATTTCTACTGTTGTAGATCTCCATCT |
| | | TGTCATCCTGCAGGCCGGCATGGTCCCAGCCTCCTCGCTGGCGCCGGCTGGGCAACAT |
| | | GCTTCGGCATGGCGAATGGGAC (SEQ ID NO: 1008) |
| ID412 | SCN1A | AAGGTCGGGCAGGAAGAGGGCCTATTTCCCATGATTCCTTCATATTTGCATATACGAT |
| | | ACAAGGCTGTTAGAGAGATAATTAGAATTAATTTGACTGTAAACACAAAGATATTAGT |
| | | ACAAAATACGTGACGTAGAAAGTAATAATTTCTTGGGTAGTTTGCAGTTTTAAAATTA |
| | | TGTTTTAAAATGGACTATCATATGCTTACCGTAACTTGAAAGTATTTCGATTTCTTGGCT |
| | | TTATATATCTTGTGGAAAGGACGAAACACCTTAATTTCTACTATTGTAGATCTCCATCTT |
| | | GTCATCCTGCAGGCCGGCATGGTCCCAGCCTCCTCGCTGGCGCCGGCTGGGCAACAT |
| | | GCTTCGGCATGGCGAATGGGAC (SEQ ID NO: 1013) |
| ID413 | SCN1A | AAGGTCGGGCAGGAAGAGGGCCTATTTCCCATGATTCCTTCATATTTGCATATACGAT |
| | | ACAAGGCTGTTAGAGAGATAATTAGAATTAATTTGACTGTAAACACAAAGATATTAGT |
| | | ACAAAATACGTGACGTAGAAAGTAATAATTTCTTGGGTAGTTTGCAGTTTTAAAATTA |
| | | TGTTTTAAAATGGACTATCATATGCTTACCGTAACTTGAAAGTATTTCGATTTCTTGGCT |
| | | TTATATATCTTGTGGAAAGGACGAAACACCATAATTTCTACTATTGTAGATCTCCATCT |
| | | TGTCATCCTGCAGGCCGGCATGGTCCCAGCCTCCTCGCTGGCGCCGGCTGGGCAACAT |
| | | GCTTCGGCATGGCGAATGGGAC (SEQ ID NO: 1014) |
| ID414 | SCN1A | AAGGTCGGGCAGGAAGAGGGCCTATTTCCCATGATTCCTTCATATTTGCATATACGAT |
| | | ACAAGGCTGTTAGAGAGATAATTAGAATTAATTTGACTGTAAACACAAAGATATTAGT |
| | | ACAAAATACGTGACGTAGAAAGTAATAATTTCTTGGGTAGTTTGCAGTTTTAAAATTA |
| | | TGTTTTAAAATGGACTATCATATGCTTACCGTAACTTGAAAGTATTTCGATTTCTTGGCT |
| | | TTATATATCTTGTGGAAAGGACGAAACACCATAATTTCTACTGTTGTAGATCTCCATCT |
| | | TGTCATCCTGCAGGCCGGCATGGTCCCAGCCTCCTCGCTGGCGCCGGCTGGGCAACAT |
| | | GCTTCGGCATGGCGAATGGGAC (SEQ ID NO: 1015) |
| ID415 | SCN1A | AAGGTCGGGCAGGAAGAGGGCCTATTTCCCATGATTCCTTCATATTTGCATATACGAT |
| | | ACAAGGCTGTTAGAGAGATAATTAGAATTAATTTGACTGTAAACACAAAGATATTAGT |
| | | ACAAAATACGTGACGTAGAAAGTAATAATTTCTTGGGTAGTTTGCAGTTTTAAAATTA |
| | | TGTTTTAAAATGGACTATCATATGCTTACCGTAACTTGAAAGTATTTCGATTTCTTGGCT |
| | | TTATATATCTTGTGGAAAGGACGAAACACCTTAATTTCTACTCTCGTAGATCTCCATCTT |
| | | GTCATCCTGCAGGCCGGCATGGTCCCAGCCTCCTCGCTGGCGCCGGCTGGGCAACAT |
| | | GCTTCGGCATGGCGAATGGGAC (SEQ ID NO: 1016) |
| ID416 | SCN1A | AAGGTCGGGCAGGAAGAGGGCCTATTTCCCATGATTCCTTCATATTTGCATATACGAT |
| | | ACAAGGCTGTTAGAGAGATAATTAGAATTAATTTGACTGTAAACACAAAGATATTAGT |
| | | ACAAAATACGTGACGTAGAAAGTAATAATTTCTTGGGTAGTTTGCAGTTTTAAAATTA |
| | | TGTTTTAAAATGGACTATCATATGCTTACCGTAACTTGAAAGTATTTCGATTTCTTGGCT |
| | | TTATATATCTTGTGGAAAGGACGAAACACCATAATTTCTACTATCGTAGATCTCCATCT |
| | | TGTCATCCTGCAGGCCGGCATGGTCCCAGCCTCCTCGCTGGCGCCGGCTGGGCAACAT |
| | | GCTTCGGCATGGCGAATGGGAC (SEQ ID NO: 1012) |
| ID417 | SCN1A | AAGGTCGGGCAGGAAGAGGGCCTATTTCCCATGATTCCTTCATATTTGCATATACGAT |
| | | ACAAGGCTGTTAGAGAGATAATTAGAATTAATTTGACTGTAAACACAAAGATATTAGT |
| | | ACAAAATACGTGACGTAGAAAGTAATAATTTCTTGGGTAGTTTGCAGTTTTAAAATTA |
| | | TGTTTTAAAATGGACTATCATATGCTTACCGTAACTTGAAAGTATTTCGATTTCTTGGCT |
| | | TTATATATCTTGTGGAAAGGACGAAACACCTAAATTTCTACTGTTGTAGATCTCCATCT |
| | | TGTCATCCTGCAGGCCGGCATGGTCCCAGCCTCCTCGCTGGCGCCGGCTGGGCAACAT |
| | | GCTTCGGCATGGCGAATGGGAC (SEQ ID NO: 1008) |
| ID418 | SCN1A | AAGGTCGGGCAGGAAGAGGGCCTATTTCCCATGATTCCTTCATATTTGCATATACGAT |
| | | ACAAGGCTGTTAGAGAGATAATTAGAATTAATTTGACTGTAAACACAAAGATATTAGT |
| | | ACAAAATACGTGACGTAGAAAGTAATAATTTCTTGGGTAGTTTGCAGTTTTAAAATTA |
| | | TGTTTTAAAATGGACTATCATATGCTTACCGTAACTTGAAAGTATTTCGATTTCTTGGCT |
| | | TTATATATCTTGTGGAAAGGACGAAACACCTAAATTTCTACTATTGTAGATCTCCATCT |
| | | TGTCATCCTGCAGGCCGGCATGGTCCCAGCCTCCTCGCTGGCGCCGGCTGGGCAACAT |
| | | GCTTCGGCATGGCGAATGGGAC (SEQ ID NO: 1017) |
| ID419 | SCN1A | AAGGTCGGGCAGGAAGAGGGCCTATTTCCCATGATTCCTTCATATTTGCATATACGAT |
| | | ACAAGGCTGTTAGAGAGATAATTAGAATTAATTTGACTGTAAACACAAAGATATTAGT |
| | | ACAAAATACGTGACGTAGAAAGTAATAATTTCTTGGGTAGTTTGCAGTTTTAAAATTA |
| | | TGTTTTAAAATGGACTATCATATGCTTACCGTAACTTGAAAGTATTTCGATTTCTTGGCT |
| | | TTATATATCTTGTGGAAAGGACGAAACACCAGAATTTCTACTGTTGTAGATCTCCATCT |
| | | TGTCATCCTGCAGGCCGGCATGGTCCCAGCCTCCTCGCTGGCGCCGGCTGGGCAACAT |
| | | GCTTCGGCATGGCGAATGGGAC (SEQ ID NO: 1004) |
| ID420 | SCN1A | AAGGTCGGGCAGGAAGAGGGCCTATTTCCCATGATTCCTTCATATTTGCATATACGAT |
| | | ACAAGGCTGTTAGAGAGATAATTAGAATTAATTTGACTGTAAACACAAAGATATTAGT |
| | | ACAAAATACGTGACGTAGAAAGTAATAATTTCTTGGGTAGTTTGCAGTTTTAAAATTA |
| | | TGTTTTAAAATGGACTATCATATGCTTACCGTAACTTGAAAGTATTTCGATTTCTTGGCT |
| | | TTATATATCTTGTGGAAAGGACGAAACACCATAATTTCTACTATTGTAGATCTCCATCT |
| | | TGTCATCCTGCAGGCCGGCATGGTCCCAGCCTCCTCGCTGGCGCCGGCTGGGCAACAT |
| | | GCTTCGGCATGGCGAATGGGAC (SEQ ID NO: 1014) |
| ID421 | SCN1A | AAGGTCGGGCAGGAAGAGGGCCTATTTCCCATGATTCCTTCATATTTGCATATACGAT |
| | | ACAAGGCTGTTAGAGAGATAATTAGAATTAATTTGACTGTAAACACAAAGATATTAGT |
| | | ACAAAATACGTGACGTAGAAAGTAATAATTTCTTGGGTAGTTTGCAGTTTTAAAATTA |
| | | TGTTTTAAAATGGACTATCATATGCTTACCGTAACTTGAAAGTATTTCGATTTCTTGGCT |
| | | TTATATATCTTGTGGAAAGGACGAAACACCATAATTTCTACTATTGTAGATCTCCATCT |
| | | TGTCATCCTGCAGGCCGGCATGGTCCCAGCCTCCTCGCTGGCGCCGGCTGGGCAACAT |
| | | GCTTCGGCATGGCGAATGGGAC (SEQ ID NO: 1014) |
| ID422 | SCN1A | AAGGTCGGGCAGGAAGAGGGCCTATTTCCCATGATTCCTTCATATTTGCATATACGAT |
| | | ACAAGGCTGTTAGAGAGATAATTAGAATTAATTTGACTGTAAACACAAAGATATTAGT |
| | | ACAAAATACGTGACGTAGAAAGTAATAATTTCTTGGGTAGTTTGCAGTTTTAAAATTA |
| | | TGTTTTAAAATGGACTATCATATGCTTACCGTAACTTGAAAGTATTTCGATTTCTTGGCT |
| | | TTATATATCTTGTGGAAAGGACGAAACACCAAAATTTCTACTATTGTAGATCTCCATCT |
| | | TGTCATCCTGCAGGCCGGCATGGTCCCAGCCTCCTCGCTGGCGCCGGCTGGGCAACAT |
| | | GCTTCGGCATGGCGAATGGGAC (SEQ ID NO: 1006) |
| ID423 | SCN1A_T1 | AAGGTCGGGCAGGAAGAGGGCCTATTTCCCATGATTCCTTCATATTTGCATATACGAT |
| | | ACAAGGCTGTTAGAGAGATAATTAGAATTAATTTGACTGTAAACACAAAGATATTAGT |
| | | ACAAAATACGTGACGTAGAAAGTAATAATTTCTTGGGTAGTTTGCAGTTTTAAAATTA |
| | | TGTTTTAAAATGGACTATCATATGCTTACCGTAACTTGAAAGTATTTCGATTTCTTGGCT |
| | | TTATATATCTTGTGGAAAGGACGAAACACCGAAATTTCTACTATCGTAGATTTTGCCTT |
| | | TTCTTCTGCAATGCGGGCCGGCATGGTCCCAGCCTCCTCGCTGGCGCCGGCTGGGCAA |
| | | CATGCTTCGGCATGGCGAATGGGAC (SEQ ID NO: 1018) |
| ID423 | SCN1A_T2 | AAGGTCGGGCAGGAAGAGGGCCTATTTCCCATGATTCCTTCATATTTGCATATACGAT |
| | | ACAAGGCTGTTAGAGAGATAATTAGAATTAATTTGACTGTAAACACAAAGATATTAGT |
| | | ACAAAATACGTGACGTAGAAAGTAATAATTTCTTGGGTAGTTTGCAGTTTTAAAATTA |
| | | TGTTTTAAAATGGACTATCATATGCTTACCGTAACTTGAAAGTATTTCGATTTCTTGGCT |
| | | TTATATATCTTGTGGAAAGGACGAAACACCGAAATTTCTACTATCGTAGATTCTGGTG |
| | | AAGAAGTTGAAGCTGTGGCCGGCATGGTCCCAGCCTCCTCGCTGGCGCCGGCTGGGC |
| | | AACATGCTTCGGCATGGCGAATGGGAC (SEQ ID NO: 1019) |
| ID424 | SCN1A | AAGGTCGGGCAGGAAGAGGGCCTATTTCCCATGATTCCTTCATATTTGCATATACGAT |
| | | ACAAGGCTGTTAGAGAGATAATTAGAATTAATTTGACTGTAAACACAAAGATATTAGT |
| | | ACAAAATACGTGACGTAGAAAGTAATAATTTCTTGGGTAGTTTGCAGTTTTAAAATTA |
| | | TGTTTTAAAATGGACTATCATATGCTTACCGTAACTTGAAAGTATTTCGATTTCTTGGCT |
| | | TTATATATCTTGTGGAAAGGACGAAACACCATAATTTCTACTATTGTAGATCTCCATCT |
| | | TGTCATCCTGCAGGCCGGCATGGTCCCAGCCTCCTCGCTGGCGCCGGCTGGGCAACAT |
| | | GCTTCGGCATGGCGAATGGGAC (SEQ ID NO: 1014) |
| ID425 | SCN1A | AAGGTCGGGCAGGAAGAGGGCCTATTTCCCATGATTCCTTCATATTTGCATATACGAT |
| | | ACAAGGCTGTTAGAGAGATAATTAGAATTAATTTGACTGTAAACACAAAGATATTAGT |
| | | ACAAAATACGTGACGTAGAAAGTAATAATTTCTTGGGTAGTTTGCAGTTTTAAAATTA |
| | | TGTTTTAAAATGGACTATCATATGCTTACCGTAACTTGAAAGTATTTCGATTTCTTGGCT |
| | | TTATATATCTTGTGGAAAGGACGAAACACCTAAATTTCTACTATTGTAGATCTCCATCT |
| | | TGTCATCCTGCAGGCCGGCATGGTCCCAGCCTCCTCGCTGGCGCCGGCTGGGCAACAT |
| | | GCTTCGGCATGGCGAATGGGAC (SEQ ID NO: 1017) |
| ID426 | SCN1A | AAGGTCGGGCAGGAAGAGGGCCTATTTCCCATGATTCCTTCATATTTGCATATACGAT |
| | | ACAAGGCTGTTAGAGAGATAATTAGAATTAATTTGACTGTAAACACAAAGATATTAGT |
| | | ACAAAATACGTGACGTAGAAAGTAATAATTTCTTGGGTAGTTTGCAGTTTTAAAATTA |
| | | TGTTTTAAAATGGACTATCATATGCTTACCGTAACTTGAAAGTATTTCGATTTCTTGGCT |
| | | TTATATATCTTGTGGAAAGGACGAAACACCTCAATTTCTACTGTTGTAGATCTCCATCT |
| | | TGTCATCCTGCAGGCCGGCATGGTCCCAGCCTCCTCGCTGGCGCCGGCTGGGCAACAT |
| | | GCTTCGGCATGGCGAATGGGAC (SEQ ID NO: 1020) |
| ID427 | SCN1A | AAGGTCGGGCAGGAAGAGGGCCTATTTCCCATGATTCCTTCATATTTGCATATACGAT |
| | | ACAAGGCTGTTAGAGAGATAATTAGAATTAATTTGACTGTAAACACAAAGATATTAGT |
| | | ACAAAATACGTGACGTAGAAAGTAATAATTTCTTGGGTAGTTTGCAGTTTTAAAATTA |
| | | TGTTTTAAAATGGACTATCATATGCTTACCGTAACTTGAAAGTATTTCGATTTCTTGGCT |
| | | TTATATATCTTGTGGAAAGGACGAAACACCAAAATTTCTACTATTGTAGATCTCCATCT |
| | | TGTCATCCTGCAGGCCGGCATGGTCCCAGCCTCCTCGCTGGCGCCGGCTGGGCAACAT |
| | | GCTTCGGCATGGCGAATGGGAC (SEQ ID NO: 1006) |
| ID428 | SCN1A | AAGGTCGGGCAGGAAGAGGGCCTATTTCCCATGATTCCTTCATATTTGCATATACGAT |
| | | ACAAGGCTGTTAGAGAGATAATTAGAATTAATTTGACTGTAAACACAAAGATATTAGT |
| | | ACAAAATACGTGACGTAGAAAGTAATAATTTCTTGGGTAGTTTGCAGTTTTAAAATTA |
| | | TGTTTTAAAATGGACTATCATATGCTTACCGTAACTTGAAAGTATTTCGATTTCTTGGCT |
| | | TTATATATCTTGTGGAAAGGACGAAACACCTAAATTTCTACTATTGTAGATCTCCATCT |
| | | TGTCATCCTGCAGGCCGGCATGGTCCCAGCCTCCTCGCTGGCGCCGGCTGGGCAACAT |
| | | GCTTCGGCATGGCGAATGGGAC (SEQ ID NO: 1017) |
| ID429 | SCN1A | AAGGTCGGGCAGGAAGAGGGCCTATTTCCCATGATTCCTTCATATTTGCATATACGAT |
| | | ACAAGGCTGTTAGAGAGATAATTAGAATTAATTTGACTGTAAACACAAAGATATTAGT |
| | | ACAAAATACGTGACGTAGAAAGTAATAATTTCTTGGGTAGTTTGCAGTTTTAAAATTA |
| | | TGTTTTAAAATGGACTATCATATGCTTACCGTAACTTGAAAGTATTTCGATTTCTTGGCT |
| | | TTATATATCTTGTGGAAAGGACGAAACACCATAATTTCTACTGTTGTAGATCTCCATCT |
| | | TGTCATCCTGCAGGCCGGCATGGTCCCAGCCTCCTCGCTGGCGCCGGCTGGGCAACAT |
| | | GCTTCGGCATGGCGAATGGGAC (SEQ ID NO: 1015) |
| ID432 | SCN1A | AAGGTCGGGCAGGAAGAGGGCCTATTTCCCATGATTCCTTCATATTTGCATATACGAT |
| | | ACAAGGCTGTTAGAGAGATAATTAGAATTAATTTGACTGTAAACACAAAGATATTAGT |
| | | ACAAAATACGTGACGTAGAAAGTAATAATTTCTTGGGTAGTTTGCAGTTTTAAAATTA |
| | | TGTTTTAAAATGGACTATCATATGCTTACCGTAACTTGAAAGTATTTCGATTTCTTGGCT |
| | | TTATATATCTTGTGGAAAGGACGAAACACCATAATTTCTACTGTTGTAGATCTCCATCT |
| | | TGTCATCCTGCAGGCCGGCATGGTCCCAGCCTCCTCGCTGGCGCCGGCTGGGCAACAT |
| | | GCTTCGGCATGGCGAATGGGAC (SEQ ID NO: 1015) |
| ID433 | SCN1A | AAGGTCGGGCAGGAAGAGGGCCTATTTCCCATGATTCCTTCATATTTGCATATACGAT |
| | T1 | ACAAGGCTGTTAGAGAGATAATTAGAATTAATTTGACTGTAAACACAAAGATATTAGT |
| | | ACAAAATACGTGACGTAGAAAGTAATAATTTCTTGGGTAGTTTGCAGTTTTAAAATTA |
| | | TGTTTTAAAATGGACTATCATATGCTTACCGTAACTTGAAAGTATTTCGATTTCTTGGCT |
| | | TTATATATCTTGTGGAAAGGACGAAACACCAAAATTTCTGCTATTGCAGATTGGTGAA |
| | | GAAGTTGAAGCTGTCAGGCCGGCATGGTCCCAGCCTCCTCGCTGGCGCCGGCTGGGC |
| | | AACATGCTTCGGCATGGCGAATGGGAC (SEQ ID NO: 1021) |
| ID433 | SCN1A | AAGGTCGGGCAGGAAGAGGGCCTATTTCCCATGATTCCTTCATATTTGCATATACGAT |
| | T2 | ACAAGGCTGTTAGAGAGATAATTAGAATTAATTTGACTGTAAACACAAAGATATTAGT |
| | | ACAAAATACGTGACGTAGAAAGTAATAATTTCTTGGGTAGTTTGCAGTTTTAAAATTA |
| | | TGTTTTAAAATGGACTATCATATGCTTACCGTAACTTGAAAGTATTTCGATTTCTTGGCT |
| | | TTATATATCTTGTGGAAAGGACGAAACACCAAAATTTCTGCTATTGCAGATCATCTTGT |
| | | CATCCTGCACATTTTGGCCGGCATGGTCCCAGCCTCCTCGCTGGCGCCGGCTGGGCAA |
| | | CATGCTTCGGCATGGCGAATGGGAC (SEQ ID NO: 1022) |
| LbaCas12a | FANCF | AAGGTCGGGCAGGAAGAGGGCCTATTTCCCATGATTCCTTCATATTTGCATATACGAT |
| | site 1 | ACAAGGCTGTTAGAGAGATAATTAGAATTAATTTGACTGTAAACACAAAGATATTAGT |
| | | ACAAAATACGTGACGTAGAAAGTAATAATTTCTTGGGTAGTTTGCAGTTTTAAAATTA |
| | | TGTTTTAAAATGGACTATCATATGCTTACCGTAACTTGAAAGTATTTCGATTTCTTGGCT |
| | | TTATATATCTTGTGGAAAGGACGAAACACCTAATTTCTACTAAGTGTAGATGTCGGCA |
| | | TGGCCCCATTCGCACGGGCCGGCATGGTCCCAGCCTCCTCGCTGGCGCCGGCTGGGC |
| | | AACATGCTTCGGCATGGCGAATGGGAC (SEQ ID NO: 1023) |
| ID401 | FANCF | AAGGTCGGGCAGGAAGAGGGCCTATTTCCCATGATTCCTTCATATTTGCATATACGAT |
| | site 1 | ACAAGGCTGTTAGAGAGATAATTAGAATTAATTTGACTGTAAACACAAAGATATTAGT |
| | | ACAAAATACGTGACGTAGAAAGTAATAATTTCTTGGGTAGTTTGCAGTTTTAAAATTA |
| | | TGTTTTAAAATGGACTATCATATGCTTACCGTAACTTGAAAGTATTTCGATTTCTTGGCT |
| | | TTATATATCTTGTGGAAAGGACGAAACACCAGAATTTCTACTGTTGTAGATGTCGGCA |
| | | TGGCCCCATTCGCACGGGCCGGCATGGTCCCAGCCTCCTCGCTGGCGCCGGCTGGGC |
| | | AACATGCTTCGGCATGGCGAATGGGAC (SEQ ID NO: 1024) |
| ID402 | FANCF | AAGGTCGGGCAGGAAGAGGGCCTATTTCCCATGATTCCTTCATATTTGCATATACGAT |
| | site 1 | ACAAGGCTGTTAGAGAGATAATTAGAATTAATTTGACTGTAAACACAAAGATATTAGT |
| | | ACAAAATACGTGACGTAGAAAGTAATAATTTCTTGGGTAGTTTGCAGTTTTAAAATTA |
| | | TGTTTTAAAATGGACTATCATATGCTTACCGTAACTTGAAAGTATTTCGATTTCTTGGCT |
| | | TTATATATCTTGTGGAAAGGACGAAACACCAAAATTTCTACTCTTGTAGATGTCGGCAT |
| | | GGCCCCATTCGCACGGGCCGGCATGGTCCCAGCCTCCTCGCTGGCGCCGGCTGGGCA |
| | | ACATGCTTCGGCATGGCGAATGGGAC (SEQ ID NO: 1025) |
| ID403 | FANCF | AAGGTCGGGCAGGAAGAGGGCCTATTTCCCATGATTCCTTCATATTTGCATATACGAT |
| | site 1 | ACAAGGCTGTTAGAGAGATAATTAGAATTAATTTGACTGTAAACACAAAGATATTAGT |
| | | ACAAAATACGTGACGTAGAAAGTAATAATTTCTTGGGTAGTTTGCAGTTTTAAAATTA |
| | | TGTTTTAAAATGGACTATCATATGCTTACCGTAACTTGAAAGTATTTCGATTTCTTGGCT |
| | | TTATATATCTTGTGGAAAGGACGAAACACCAAAATTTCTACTATTGTAGATGTCGGCA |
| | | TGGCCCCATTCGCACGGGCCGGCATGGTCCCAGCCTCCTCGCTGGCGCCGGCTGGGC |
| | | AACATGCTTCGGCATGGCGAATGGGAC (SEQ ID NO: 1026) |
| ID404 | FANCF | AAGGTCGGGCAGGAAGAGGGCCTATTTCCCATGATTCCTTCATATTTGCATATACGAT |
| | site 1 | ACAAGGCTGTTAGAGAGATAATTAGAATTAATTTGACTGTAAACACAAAGATATTAGT |
| | | ACAAAATACGTGACGTAGAAAGTAATAATTTCTTGGGTAGTTTGCAGTTTTAAAATTA |
| | | TGTTTTAAAATGGACTATCATATGCTTACCGTAACTTGAAAGTATTTCGATTTCTTGGCT |
| | | TTATATATCTTGTGGAAAGGACGAAACACCAAAATTTCTACTCTTGTAGATGTCGGCAT |
| | | GGCCCCATTCGCACGGGCCGGCATGGTCCCAGCCTCCTCGCTGGCGCCGGCTGGGCA |
| | | ACATGCTTCGGCATGGCGAATGGGAC (SEQ ID NO: 1025) |
| ID405 | FANCF | AAGGTCGGGCAGGAAGAGGGCCTATTTCCCATGATTCCTTCATATTTGCATATACGAT |
| | site 1 | ACAAGGCTGTTAGAGAGATAATTAGAATTAATTTGACTGTAAACACAAAGATATTAGT |
| | | ACAAAATACGTGACGTAGAAAGTAATAATTTCTTGGGTAGTTTGCAGTTTTAAAATTA |
| | | TGTTTTAAAATGGACTATCATATGCTTACCGTAACTTGAAAGTATTTCGATTTCTTGGCT |
| | | TTATATATCTTGTGGAAAGGACGAAACACCTGAATTTCTACTGTTGTAGATGTCGGCA |
| | | TGGCCCCATTCGCACGGGCCGGCATGGTCCCAGCCTCCTCGCTGGCGCCGGCTGGGC |
| | | AACATGCTTCGGCATGGCGAATGGGAC (SEQ ID NO: 1027) |
| ID406 | FANCF | AAGGTCGGGCAGGAAGAGGGCCTATTTCCCATGATTCCTTCATATTTGCATATACGAT |
| | site 1 | ACAAGGCTGTTAGAGAGATAATTAGAATTAATTTGACTGTAAACACAAAGATATTAGT |
| | | ACAAAATACGTGACGTAGAAAGTAATAATTTCTTGGGTAGTTTGCAGTTTTAAAATTA |
| | | TGTTTTAAAATGGACTATCATATGCTTACCGTAACTTGAAAGTATTTCGATTTCTTGGCT |
| | | TTATATATCTTGTGGAAAGGACGAAACACCTAAATTTCTACTGTTGTAGATGTCGGCAT |
| | | GGCCCCATTCGCACGGGCCGGCATGGTCCCAGCCTCCTCGCTGGCGCCGGCTGGGCA |
| | | ACATGCTTCGGCATGGCGAATGGGAC (SEQ ID NO: 1028) |
| ID407 | FANCF | AAGGTCGGGCAGGAAGAGGGCCTATTTCCCATGATTCCTTCATATTTGCATATACGAT |
| | site 1 | ACAAGGCTGTTAGAGAGATAATTAGAATTAATTTGACTGTAAACACAAAGATATTAGT |
| | | ACAAAATACGTGACGTAGAAAGTAATAATTTCTTGGGTAGTTTGCAGTTTTAAAATTA |
| | | TGTTTTAAAATGGACTATCATATGCTTACCGTAACTTGAAAGTATTTCGATTTCTTGGCT |
| | | TTATATATCTTGTGGAAAGGACGAAACACCAAAATTTCTACTATTGTAGATGTCGGCA |
| | | TGGCCCCATTCGCACGGGCCGGCATGGTCCCAGCCTCCTCGCTGGCGCCGGCTGGGC |
| | | AACATGCTTCGGCATGGCGAATGGGAC (SEQ ID NO: 1026) |
| ID408 | FANCF | AAGGTCGGGCAGGAAGAGGGCCTATTTCCCATGATTCCTTCATATTTGCATATACGAT |
| | site 1 | ACAAGGCTGTTAGAGAGATAATTAGAATTAATTTGACTGTAAACACAAAGATATTAGT |
| | | ACAAAATACGTGACGTAGAAAGTAATAATTTCTTGGGTAGTTTGCAGTTTTAAAATTA |
| | | TGTTTTAAAATGGACTATCATATGCTTACCGTAACTTGAAAGTATTTCGATTTCTTGGCT |
| | | TTATATATCTTGTGGAAAGGACGAAACACCAAAATTTCTGCTATTGCAGATGTCGGCA |
| | | TGGCCCCATTCGCACGGGCCGGCATGGTCCCAGCCTCCTCGCTGGCGCCGGCTGGGC |
| | | AACATGCTTCGGCATGGCGAATGGGAC (SEQ ID NO: 1029) |
| ID409 | FANCF | AAGGTCGGGCAGGAAGAGGGCCTATTTCCCATGATTCCTTCATATTTGCATATACGAT |
| | site | ACAAGGCTGTTAGAGAGATAATTAGAATTAATTTGACTGTAAACACAAAGATATTAGT |
| | 1_T1 | ACAAAATACGTGACGTAGAAAGTAATAATTTCTTGGGTAGTTTGCAGTTTTAAAATTA |
| | | TGTTTTAAAATGGACTATCATATGCTTACCGTAACTTGAAAGTATTTCGATTTCTTGGCT |
| | | TTATATATCTTGTGGAAAGGACGAAACACCTAAATTTCTACTATTGTAGATATGGAATC |
| | | CCTTCTGCAGCACCTGGCCGGCATGGTCCCAGCCTCCTCGCTGGCGCCGGCTGGGCAA |
| | | CATGCTTCGGCATGGCGAATGGGAC (SEQ ID NO: 1030) |
| ID409 | FANCF | AAGGTCGGGCAGGAAGAGGGCCTATTTCCCATGATTCCTTCATATTTGCATATACGAT |
| | site | ACAAGGCTGTTAGAGAGATAATTAGAATTAATTTGACTGTAAACACAAAGATATTAGT |
| | 1_T2 | ACAAAATACGTGACGTAGAAAGTAATAATTTCTTGGGTAGTTTGCAGTTTTAAAATTA |
| | | TGTTTTAAAATGGACTATCATATGCTTACCGTAACTTGAAAGTATTTCGATTTCTTGGCT |
| | | TTATATATCTTGTGGAAAGGACGAAACACCTAAATTTCTACTATTGTAGATAAGCACTA |
| | | CCTACGTCAGCACCTGGCCGGCATGGTCCCAGCCTCCTCGCTGGCGCCGGCTGGGCA |
| | | ACATGCTTCGGCATGGCGAATGGGAC (SEQ ID NO: 1031) |
| ID410 | FANCF | AAGGTCGGGCAGGAAGAGGGCCTATTTCCCATGATTCCTTCATATTTGCATATACGAT |
| | site 1 | ACAAGGCTGTTAGAGAGATAATTAGAATTAATTTGACTGTAAACACAAAGATATTAGT |
| | | ACAAAATACGTGACGTAGAAAGTAATAATTTCTTGGGTAGTTTGCAGTTTTAAAATTA |
| | | TGTTTTAAAATGGACTATCATATGCTTACCGTAACTTGAAAGTATTTCGATTTCTTGGCT |
| | | TTATATATCTTGTGGAAAGGACGAAACACCATAATTTCTACTATCGTAGATGTCGGCAT |
| | | GGCCCCATTCGCACGGGCCGGCATGGTCCCAGCCTCCTCGCTGGCGCCGGCTGGGCA |
| | | ACATGCTTCGGCATGGCGAATGGGAC (SEQ ID NO: 1032) |
| ID411 | FANCF | AAGGTCGGGCAGGAAGAGGGCCTATTTCCCATGATTCCTTCATATTTGCATATACGAT |
| | site 1 | ACAAGGCTGTTAGAGAGATAATTAGAATTAATTTGACTGTAAACACAAAGATATTAGT |
| | | ACAAAATACGTGACGTAGAAAGTAATAATTTCTTGGGTAGTTTGCAGTTTTAAAATTA |
| | | TGTTTTAAAATGGACTATCATATGCTTACCGTAACTTGAAAGTATTTCGATTTCTTGGCT |
| | | TTATATATCTTGTGGAAAGGACGAAACACCTAAATTTCTACTGTTGTAGATGTCGGCAT |
| | | GGCCCCATTCGCACGGGCCGGCATGGTCCCAGCCTCCTCGCTGGCGCCGGCTGGGCA |
| | | ACATGCTTCGGCATGGCGAATGGGAC (SEQ ID NO: 1028) |
| ID412 | FANCF | AAGGTCGGGCAGGAAGAGGGCCTATTTCCCATGATTCCTTCATATTTGCATATACGAT |
| | site 1 | ACAAGGCTGTTAGAGAGATAATTAGAATTAATTTGACTGTAAACACAAAGATATTAGT |
| | | ACAAAATACGTGACGTAGAAAGTAATAATTTCTTGGGTAGTTTGCAGTTTTAAAATTA |
| | | TGTTTTAAAATGGACTATCATATGCTTACCGTAACTTGAAAGTATTTCGATTTCTTGGCT |
| | | TTATATATCTTGTGGAAAGGACGAAACACCTTAATTTCTACTATTGTAGATGTCGGCAT |
| | | GGCCCCATTCGCACGGGCCGGCATGGTCCCAGCCTCCTCGCTGGCGCCGGCTGGGCA |
| | | ACATGCTTCGGCATGGCGAATGGGAC (SEQ ID NO: 1033) |
| ID413 | FANCF | AAGGTCGGGCAGGAAGAGGGCCTATTTCCCATGATTCCTTCATATTTGCATATACGAT |
| | site 1 | ACAAGGCTGTTAGAGAGATAATTAGAATTAATTTGACTGTAAACACAAAGATATTAGT |
| | | ACAAAATACGTGACGTAGAAAGTAATAATTTCTTGGGTAGTTTGCAGTTTTAAAATTA |
| | | TGTTTTAAAATGGACTATCATATGCTTACCGTAACTTGAAAGTATTTCGATTTCTTGGCT |
| | | TTATATATCTTGTGGAAAGGACGAAACACCATAATTTCTACTATTGTAGATGTCGGCAT |
| | | GGCCCCATTCGCACGGGCCGGCATGGTCCCAGCCTCCTCGCTGGCGCCGGCTGGGCA |
| | | ACATGCTTCGGCATGGCGAATGGGAC (SEQ ID NO: 1034) |
| ID414 | FANCF | AAGGTCGGGCAGGAAGAGGGCCTATTTCCCATGATTCCTTCATATTTGCATATACGAT |
| | site 1 | ACAAGGCTGTTAGAGAGATAATTAGAATTAATTTGACTGTAAACACAAAGATATTAGT |
| | | ACAAAATACGTGACGTAGAAAGTAATAATTTCTTGGGTAGTTTGCAGTTTTAAAATTA |
| | | TGTTTTAAAATGGACTATCATATGCTTACCGTAACTTGAAAGTATTTCGATTTCTTGGCT |
| | | TTATATATCTTGTGGAAAGGACGAAACACCATAATTTCTACTGTTGTAGATGTCGGCAT |
| | | GGCCCCATTCGCACGGGCCGGCATGGTCCCAGCCTCCTCGCTGGCGCCGGCTGGGCA |
| | | ACATGCTTCGGCATGGCGAATGGGAC (SEQ ID NO: 1035) |
| ID415 | FANCF | AAGGTCGGGCAGGAAGAGGGCCTATTTCCCATGATTCCTTCATATTTGCATATACGAT |
| | site 1 | ACAAGGCTGTTAGAGAGATAATTAGAATTAATTTGACTGTAAACACAAAGATATTAGT |
| | | ACAAAATACGTGACGTAGAAAGTAATAATTTCTTGGGTAGTTTGCAGTTTTAAAATTA |
| | | TGTTTTAAAATGGACTATCATATGCTTACCGTAACTTGAAAGTATTTCGATTTCTTGGCT |
| | | TTATATATCTTGTGGAAAGGACGAAACACCTTAATTTCTACTCTCGTAGATGTCGGCAT |
| | | GGCCCCATTCGCACGGGCCGGCATGGTCCCAGCCTCCTCGCTGGCGCCGGCTGGGCA |
| | | ACATGCTTCGGCATGGCGAATGGGAC (SEQ ID NO: 1036) |
| ID416 | FANCF | AAGGTCGGGCAGGAAGAGGGCCTATTTCCCATGATTCCTTCATATTTGCATATACGAT |
| | site | ACAAGGCTGTTAGAGAGATAATTAGAATTAATTTGACTGTAAACACAAAGATATTAGT |
| | 1_T1 | ACAAAATACGTGACGTAGAAAGTAATAATTTCTTGGGTAGTTTGCAGTTTTAAAATTA |
| | | TGTTTTAAAATGGACTATCATATGCTTACCGTAACTTGAAAGTATTTCGATTTCTTGGCT |
| | | TTATATATCTTGTGGAAAGGACGAAACACCATAATTTCTACTATCGTAGATTCCTAAAA |
| | | ATTACGAAAACGAAAGGCCGGCATGGTCCCAGCCTCCTCGCTGGCGCCGGCTGGGCA |
| | | ACATGCTTCGGCATGGCGAATGGGAC (SEQ ID NO: 1037) |
| ID416 | FANCF | AAGGTCGGGCAGGAAGAGGGCCTATTTCCCATGATTCCTTCATATTTGCATATACGAT |
| | site | ACAAGGCTGTTAGAGAGATAATTAGAATTAATTTGACTGTAAACACAAAGATATTAGT |
| | 1_T2 | ACAAAATACGTGACGTAGAAAGTAATAATTTCTTGGGTAGTTTGCAGTTTTAAAATTA |
| | | TGTTTTAAAATGGACTATCATATGCTTACCGTAACTTGAAAGTATTTCGATTTCTTGGCT |
| | | TTATATATCTTGTGGAAAGGACGAAACACCATAATTTCTACTATCGTAGATAAAAACCT |
| | | CAACACAGATTCTAGGGCCGGCATGGTCCCAGCCTCCTCGCTGGCGCCGGCTGGGCA |
| | | ACATGCTTCGGCATGGCGAATGGGAC (SEQ ID NO: 1038) |
| ID417 | FANCF | AAGGTCGGGCAGGAAGAGGGCCTATTTCCCATGATTCCTTCATATTTGCATATACGAT |
| | site 1 | ACAAGGCTGTTAGAGAGATAATTAGAATTAATTTGACTGTAAACACAAAGATATTAGT |
| | | ACAAAATACGTGACGTAGAAAGTAATAATTTCTTGGGTAGTTTGCAGTTTTAAAATTA |
| | | TGTTTTAAAATGGACTATCATATGCTTACCGTAACTTGAAAGTATTTCGATTTCTTGGCT |
| | | TTATATATCTTGTGGAAAGGACGAAACACCTAAATTTCTACTGTTGTAGATGTCGGCAT |
| | | GGCCCCATTCGCACGGGCCGGCATGGTCCCAGCCTCCTCGCTGGCGCCGGCTGGGCA |
| | | ACATGCTTCGGCATGGCGAATGGGAC (SEQ ID NO: 1028) |
| ID418 | FANCF | AAGGTCGGGCAGGAAGAGGGCCTATTTCCCATGATTCCTTCATATTTGCATATACGAT |
| | site 1 | ACAAGGCTGTTAGAGAGATAATTAGAATTAATTTGACTGTAAACACAAAGATATTAGT |
| | | ACAAAATACGTGACGTAGAAAGTAATAATTTCTTGGGTAGTTTGCAGTTTTAAAATTA |
| | | TGTTTTAAAATGGACTATCATATGCTTACCGTAACTTGAAAGTATTTCGATTTCTTGGCT |
| | | TTATATATCTTGTGGAAAGGACGAAACACCTAAATTTCTACTATTGTAGATGTCGGCAT |
| | | GGCCCCATTCGCACGGGCCGGCATGGTCCCAGCCTCCTCGCTGGCGCCGGCTGGGCA |
| | | ACATGCTTCGGCATGGCGAATGGGAC (SEQ ID NO: 1039) |
| ID419 | FANCF | AAGGTCGGGCAGGAAGAGGGCCTATTTCCCATGATTCCTTCATATTTGCATATACGAT |
| | site 1 | ACAAGGCTGTTAGAGAGATAATTAGAATTAATTTGACTGTAAACACAAAGATATTAGT |
| | | ACAAAATACGTGACGTAGAAAGTAATAATTTCTTGGGTAGTTTGCAGTTTTAAAATTA |
| | | TGTTTTAAAATGGACTATCATATGCTTACCGTAACTTGAAAGTATTTCGATTTCTTGGCT |
| | | TTATATATCTTGTGGAAAGGACGAAACACCAGAATTTCTACTGTTGTAGATGTCGGCA |
| | | TGGCCCCATTCGCACGGGCCGGCATGGTCCCAGCCTCCTCGCTGGCGCCGGCTGGGC |
| | | AACATGCTTCGGCATGGCGAATGGGAC (SEQ ID NO: 1024) |
| ID420 | FANCF | AAGGTCGGGCAGGAAGAGGGCCTATTTCCCATGATTCCTTCATATTTGCATATACGAT |
| | site 1 | ACAAGGCTGTTAGAGAGATAATTAGAATTAATTTGACTGTAAACACAAAGATATTAGT |
| | | ACAAAATACGTGACGTAGAAAGTAATAATTTCTTGGGTAGTTTGCAGTTTTAAAATTA |
| | | TGTTTTAAAATGGACTATCATATGCTTACCGTAACTTGAAAGTATTTCGATTTCTTGGCT |
| | | TTATATATCTTGTGGAAAGGACGAAACACCATAATTTCTACTATTGTAGATGTCGGCAT |
| | | GGCCCCATTCGCACGGGCCGGCATGGTCCCAGCCTCCTCGCTGGCGCCGGCTGGGCA |
| | | ACATGCTTCGGCATGGCGAATGGGAC (SEQ ID NO: 1034) |
| ID421 | FANCF | AAGGTCGGGCAGGAAGAGGGCCTATTTCCCATGATTCCTTCATATTTGCATATACGAT |
| | site 1 | ACAAGGCTGTTAGAGAGATAATTAGAATTAATTTGACTGTAAACACAAAGATATTAGT |
| | | ACAAAATACGTGACGTAGAAAGTAATAATTTCTTGGGTAGTTTGCAGTTTTAAAATTA |
| | | TGTTTTAAAATGGACTATCATATGCTTACCGTAACTTGAAAGTATTTCGATTTCTTGGCT |
| | | TTATATATCTTGTGGAAAGGACGAAACACCATAATTTCTACTATTGTAGATGTCGGCAT |
| | | GGCCCCATTCGCACGGGCCGGCATGGTCCCAGCCTCCTCGCTGGCGCCGGCTGGGCA |
| | | ACATGCTTCGGCATGGCGAATGGGAC (SEQ ID NO: 1034) |
| ID422 | FANCF | AAGGTCGGGCAGGAAGAGGGCCTATTTCCCATGATTCCTTCATATTTGCATATACGAT |
| | site 1 | ACAAGGCTGTTAGAGAGATAATTAGAATTAATTTGACTGTAAACACAAAGATATTAGT |
| | | ACAAAATACGTGACGTAGAAAGTAATAATTTCTTGGGTAGTTTGCAGTTTTAAAATTA |
| | | TGTTTTAAAATGGACTATCATATGCTTACCGTAACTTGAAAGTATTTCGATTTCTTGGCT |
| | | TTATATATCTTGTGGAAAGGACGAAACACCAAAATTTCTACTATTGTAGATGTCGGCA |
| | | TGGCCCCATTCGCACGGGCCGGCATGGTCCCAGCCTCCTCGCTGGCGCCGGCTGGGC |
| | | AACATGCTTCGGCATGGCGAATGGGAC (SEQ ID NO: 1026) |
| ID423 | FANCF | AAGGTCGGGCAGGAAGAGGGCCTATTTCCCATGATTCCTTCATATTTGCATATACGAT |
| | site | ACAAGGCTGTTAGAGAGATAATTAGAATTAATTTGACTGTAAACACAAAGATATTAGT |
| | 1_T1 | ACAAAATACGTGACGTAGAAAGTAATAATTTCTTGGGTAGTTTGCAGTTTTAAAATTA |
| | | TGTTTTAAAATGGACTATCATATGCTTACCGTAACTTGAAAGTATTTCGATTTCTTGGCT |
| | | TTATATATCTTGTGGAAAGGACGAAACACCGAAATTTCTACTATCGTAGATAAATAATC |
| | | TGGGCTTCAGTTCTAGGCCGGCATGGTCCCAGCCTCCTCGCTGGCGCCGGCTGGGCA |
| | | ACATGCTTCGGCATGGCGAATGGGAC (SEQ ID NO: 1040) |
| ID423 | FANCF | AAGGTCGGGCAGGAAGAGGGCCTATTTCCCATGATTCCTTCATATTTGCATATACGAT |
| | site | ACAAGGCTGTTAGAGAGATAATTAGAATTAATTTGACTGTAAACACAAAGATATTAGT |
| | 1_T2 | ACAAAATACGTGACGTAGAAAGTAATAATTTCTTGGGTAGTTTGCAGTTTTAAAATTA |
| | | TGTTTTAAAATGGACTATCATATGCTTACCGTAACTTGAAAGTATTTCGATTTCTTGGCT |
| | | TTATATATCTTGTGGAAAGGACGAAACACCGAAATTTCTACTATCGTAGATCTCACGTC |
| | | ACAGTATGTCTCTGGGGCCGGCATGGTCCCAGCCTCCTCGCTGGCGCCGGCTGGGCA |
| | | ACATGCTTCGGCATGGCGAATGGGAC (SEQ ID NO: 1041) |
| ID424 | FANCF | AAGGTCGGGCAGGAAGAGGGCCTATTTCCCATGATTCCTTCATATTTGCATATACGAT |
| | site 1 | ACAAGGCTGTTAGAGAGATAATTAGAATTAATTTGACTGTAAACACAAAGATATTAGT |
| | | ACAAAATACGTGACGTAGAAAGTAATAATTTCTTGGGTAGTTTGCAGTTTTAAAATTA |
| | | TGTTTTAAAATGGACTATCATATGCTTACCGTAACTTGAAAGTATTTCGATTTCTTGGCT |
| | | TTATATATCTTGTGGAAAGGACGAAACACCATAATTTCTACTATTGTAGATGTCGGCAT |
| | | GGCCCCATTCGCACGGGCCGGCATGGTCCCAGCCTCCTCGCTGGCGCCGGCTGGGCA |
| | | ACATGCTTCGGCATGGCGAATGGGAC (SEQ ID NO: 1034) |
| ID425 | FANCF | AAGGTCGGGCAGGAAGAGGGCCTATTTCCCATGATTCCTTCATATTTGCATATACGAT |
| | site 1 | ACAAGGCTGTTAGAGAGATAATTAGAATTAATTTGACTGTAAACACAAAGATATTAGT |
| | | ACAAAATACGTGACGTAGAAAGTAATAATTTCTTGGGTAGTTTGCAGTTTTAAAATTA |
| | | TGTTTTAAAATGGACTATCATATGCTTACCGTAACTTGAAAGTATTTCGATTTCTTGGCT |
| | | TTATATATCTTGTGGAAAGGACGAAACACCTAAATTTCTACTATTGTAGATGTCGGCAT |
| | | GGCCCCATTCGCACGGGCCGGCATGGTCCCAGCCTCCTCGCTGGCGCCGGCTGGGCA |
| | | ACATGCTTCGGCATGGCGAATGGGAC (SEQ ID NO: 1039) |
| ID426 | FANCF | AAGGTCGGGCAGGAAGAGGGCCTATTTCCCATGATTCCTTCATATTTGCATATACGAT |
| | site 1 | ACAAGGCTGTTAGAGAGATAATTAGAATTAATTTGACTGTAAACACAAAGATATTAGT |
| | | ACAAAATACGTGACGTAGAAAGTAATAATTTCTTGGGTAGTTTGCAGTTTTAAAATTA |
| | | TGTTTTAAAATGGACTATCATATGCTTACCGTAACTTGAAAGTATTTCGATTTCTTGGCT |
| | | TTATATATCTTGTGGAAAGGACGAAACACCTCAATTTCTACTGTTGTAGATGTCGGCAT |
| | | GGCCCCATTCGCACGGGCCGGCATGGTCCCAGCCTCCTCGCTGGCGCCGGCTGGGCA |
| | | ACATGCTTCGGCATGGCGAATGGGAC (SEQ ID NO: 1042) |
| ID427 | FANCF | AAGGTCGGGCAGGAAGAGGGCCTATTTCCCATGATTCCTTCATATTTGCATATACGAT |
| | site 1 | ACAAGGCTGTTAGAGAGATAATTAGAATTAATTTGACTGTAAACACAAAGATATTAGT |
| | | ACAAAATACGTGACGTAGAAAGTAATAATTTCTTGGGTAGTTTGCAGTTTTAAAATTA |
| | | TGTTTTAAAATGGACTATCATATGCTTACCGTAACTTGAAAGTATTTCGATTTCTTGGCT |
| | | TTATATATCTTGTGGAAAGGACGAAACACCAAAATTTCTACTATTGTAGATGTCGGCA |
| | | TGGCCCCATTCGCACGGGCCGGCATGGTCCCAGCCTCCTCGCTGGCGCCGGCTGGGC |
| | | AACATGCTTCGGCATGGCGAATGGGAC (SEQ ID NO: 1026) |
| ID428 | FANCF | AAGGTCGGGCAGGAAGAGGGCCTATTTCCCATGATTCCTTCATATTTGCATATACGAT |
| | site | ACAAGGCTGTTAGAGAGATAATTAGAATTAATTTGACTGTAAACACAAAGATATTAGT |
| | 1_T1 | ACAAAATACGTGACGTAGAAAGTAATAATTTCTTGGGTAGTTTGCAGTTTTAAAATTA |
| | | TGTTTTAAAATGGACTATCATATGCTTACCGTAACTTGAAAGTATTTCGATTTCTTGGCT |
| | | TTATATATCTTGTGGAAAGGACGAAACACCTAAATTTCTACTATTGTAGATTGGCGTTA |
| | | CTTAATTTTGAAAAAGGCCGGCATGGTCCCAGCCTCCTCGCTGGCGCCGGCTGGGCAA |
| | | CATGCTTCGGCATGGCGAATGGGAC (SEQ ID NO: 1043) |
| ID428 | FANCF | AAGGTCGGGCAGGAAGAGGGCCTATTTCCCATGATTCCTTCATATTTGCATATACGAT |
| | site | ACAAGGCTGTTAGAGAGATAATTAGAATTAATTTGACTGTAAACACAAAGATATTAGT |
| | 1_T2 | ACAAAATACGTGACGTAGAAAGTAATAATTTCTTGGGTAGTTTGCAGTTTTAAAATTA |
| | | TGTTTTAAAATGGACTATCATATGCTTACCGTAACTTGAAAGTATTTCGATTTCTTGGCT |
| | | TTATATATCTTGTGGAAAGGACGAAACACCTAAATTTCTACTATTGTAGATAAGCACTA |
| | | CCTACGTCAGCACCTGGCCGGCATGGTCCCAGCCTCCTCGCTGGCGCCGGCTGGGCA |
| | | ACATGCTTCGGCATGGCGAATGGGAC (SEQ ID NO: 1031) |
| ID429 | FANCF | AAGGTCGGGCAGGAAGAGGGCCTATTTCCCATGATTCCTTCATATTTGCATATACGAT |
| | site 1 | ACAAGGCTGTTAGAGAGATAATTAGAATTAATTTGACTGTAAACACAAAGATATTAGT |
| | | ACAAAATACGTGACGTAGAAAGTAATAATTTCTTGGGTAGTTTGCAGTTTTAAAATTA |
| | | TGTTTTAAAATGGACTATCATATGCTTACCGTAACTTGAAAGTATTTCGATTTCTTGGCT |
| | | TTATATATCTTGTGGAAAGGACGAAACACCATAATTTCTACTGTTGTAGATGTCGGCAT |
| | | GGCCCCATTCGCACGGGCCGGCATGGTCCCAGCCTCCTCGCTGGCGCCGGCTGGGCA |
| | | ACATGCTTCGGCATGGCGAATGGGAC (SEQ ID NO: 1035) |
| ID432 | FANCF | AAGGTCGGGCAGGAAGAGGGCCTATTTCCCATGATTCCTTCATATTTGCATATACGAT |
| | site 1 | ACAAGGCTGTTAGAGAGATAATTAGAATTAATTTGACTGTAAACACAAAGATATTAGT |
| | | ACAAAATACGTGACGTAGAAAGTAATAATTTCTTGGGTAGTTTGCAGTTTTAAAATTA |
| | | TGTTTTAAAATGGACTATCATATGCTTACCGTAACTTGAAAGTATTTCGATTTCTTGGCT |
| | | TTATATATCTTGTGGAAAGGACGAAACACCATAATTTCTACTGTTGTAGATGTCGGCAT |
| | | GGCCCCATTCGCACGGGCCGGCATGGTCCCAGCCTCCTCGCTGGCGCCGGCTGGGCA |
| | | ACATGCTTCGGCATGGCGAATGGGAC (SEQ ID NO: 1035) |
| ID433 | FANCF | AAGGTCGGGCAGGAAGAGGGCCTATTTCCCATGATTCCTTCATATTTGCATATACGAT |
| | site | ACAAGGCTGTTAGAGAGATAATTAGAATTAATTTGACTGTAAACACAAAGATATTAGT |
| | 1_T1 | ACAAAATACGTGACGTAGAAAGTAATAATTTCTTGGGTAGTTTGCAGTTTTAAAATTA |
| | | TGTTTTAAAATGGACTATCATATGCTTACCGTAACTTGAAAGTATTTCGATTTCTTGGCT |
| | | TTATATATCTTGTGGAAAGGACGAAACACCAAAATTTCTGCTATTGCAGATTGGCGTT |
| | | ACTTAATTTTGAAAAAGGCCGGCATGGTCCCAGCCTCCTCGCTGGCGCCGGCTGGGCA |
| | | ACATGCTTCGGCATGGCGAATGGGAC (SEQ ID NO: 1044) |
| ID433 | FANCF | AAGGTCGGGCAGGAAGAGGGCCTATTTCCCATGATTCCTTCATATTTGCATATACGAT |
| | site | ACAAGGCTGTTAGAGAGATAATTAGAATTAATTTGACTGTAAACACAAAGATATTAGT |
| | 1_T2 | ACAAAATACGTGACGTAGAAAGTAATAATTTCTTGGGTAGTTTGCAGTTTTAAAATTA |
| | | TGTTTTAAAATGGACTATCATATGCTTACCGTAACTTGAAAGTATTTCGATTTCTTGGCT |
| | | TTATATATCTTGTGGAAAGGACGAAACACCAAAATTTCTGCTATTGCAGATAAGCACT |
| | | ACCTACGTCAGCACCTGGCCGGCATGGTCCCAGCCTCCTCGCTGGCGCCGGCTGGGC |
| | | AACATGCTTCGGCATGGCGAATGGGAC (SEQ ID NO: 1045) |
| LbaCas12a | FANCF | AAGGTCGGGCAGGAAGAGGGCCTATTTCCCATGATTCCTTCATATTTGCATATACGAT |
| | site 2 | ACAAGGCTGTTAGAGAGATAATTAGAATTAATTTGACTGTAAACACAAAGATATTAGT |
| | | ACAAAATACGTGACGTAGAAAGTAATAATTTCTTGGGTAGTTTGCAGTTTTAAAATTA |
| | | TGTTTTAAAATGGACTATCATATGCTTACCGTAACTTGAAAGTATTTCGATTTCTTGGCT |
| | | TTATATATCTTGTGGAAAGGACGAAACACCTAATTTCTACTAAGTGTAGATGCGGATG |
| | | TTCCAATCAGTACGCGGCCGGCATGGTCCCAGCCTCCTCGCTGGCGCCGGCTGGGCA |
| | | ACATGCTTCGGCATGGCGAATGGGAC (SEQ ID NO: 1046) |
| ID401 | FANCF | AAGGTCGGGCAGGAAGAGGGCCTATTTCCCATGATTCCTTCATATTTGCATATACGAT |
| | site 2 | ACAAGGCTGTTAGAGAGATAATTAGAATTAATTTGACTGTAAACACAAAGATATTAGT |
| | | ACAAAATACGTGACGTAGAAAGTAATAATTTCTTGGGTAGTTTGCAGTTTTAAAATTA |
| | | TGTTTTAAAATGGACTATCATATGCTTACCGTAACTTGAAAGTATTTCGATTTCTTGGCT |
| | | TTATATATCTTGTGGAAAGGACGAAACACCAGAATTTCTACTGTTGTAGATGCGGATG |
| | | TTCCAATCAGTACGCGGCCGGCATGGTCCCAGCCTCCTCGCTGGCGCCGGCTGGGCA |
| | | ACATGCTTCGGCATGGCGAATGGGAC (SEQ ID NO: 1047) |
| ID402 | FANCF | AAGGTCGGGCAGGAAGAGGGCCTATTTCCCATGATTCCTTCATATTTGCATATACGAT |
| | site 2 | ACAAGGCTGTTAGAGAGATAATTAGAATTAATTTGACTGTAAACACAAAGATATTAGT |
| | | ACAAAATACGTGACGTAGAAAGTAATAATTTCTTGGGTAGTTTGCAGTTTTAAAATTA |
| | | TGTTTTAAAATGGACTATCATATGCTTACCGTAACTTGAAAGTATTTCGATTTCTTGGCT |
| | | TTATATATCTTGTGGAAAGGACGAAACACCAAAATTTCTACTCTTGTAGATGCGGATG |
| | | TTCCAATCAGTACGCGGCCGGCATGGTCCCAGCCTCCTCGCTGGCGCCGGCTGGGCA |
| | | ACATGCTTCGGCATGGCGAATGGGAC (SEQ ID NO: 1048) |
| ID403 | FANCF | AAGGTCGGGCAGGAAGAGGGCCTATTTCCCATGATTCCTTCATATTTGCATATACGAT |
| | site 2 | ACAAGGCTGTTAGAGAGATAATTAGAATTAATTTGACTGTAAACACAAAGATATTAGT |
| | | ACAAAATACGTGACGTAGAAAGTAATAATTTCTTGGGTAGTTTGCAGTTTTAAAATTA |
| | | TGTTTTAAAATGGACTATCATATGCTTACCGTAACTTGAAAGTATTTCGATTTCTTGGCT |
| | | TTATATATCTTGTGGAAAGGACGAAACACCAAAATTTCTACTATTGTAGATGCGGATG |
| | | TTCCAATCAGTACGCGGCCGGCATGGTCCCAGCCTCCTCGCTGGCGCCGGCTGGGCA |
| | | ACATGCTTCGGCATGGCGAATGGGAC (SEQ ID NO: 1049) |
| ID404 | FANCF | AAGGTCGGGCAGGAAGAGGGCCTATTTCCCATGATTCCTTCATATTTGCATATACGAT |
| | site 2 | ACAAGGCTGTTAGAGAGATAATTAGAATTAATTTGACTGTAAACACAAAGATATTAGT |
| | | ACAAAATACGTGACGTAGAAAGTAATAATTTCTTGGGTAGTTTGCAGTTTTAAAATTA |
| | | TGTTTTAAAATGGACTATCATATGCTTACCGTAACTTGAAAGTATTTCGATTTCTTGGCT |
| | | TTATATATCTTGTGGAAAGGACGAAACACCAAAATTTCTACTCTTGTAGATGCGGATG |
| | | TTCCAATCAGTACGCGGCCGGCATGGTCCCAGCCTCCTCGCTGGCGCCGGCTGGGCA |
| | | ACATGCTTCGGCATGGCGAATGGGAC (SEQ ID NO: 1048) |
| ID405 | FANCF | AAGGTCGGGCAGGAAGAGGGCCTATTTCCCATGATTCCTTCATATTTGCATATACGAT |
| | site 2 | ACAAGGCTGTTAGAGAGATAATTAGAATTAATTTGACTGTAAACACAAAGATATTAGT |
| | | ACAAAATACGTGACGTAGAAAGTAATAATTTCTTGGGTAGTTTGCAGTTTTAAAATTA |
| | | TGTTTTAAAATGGACTATCATATGCTTACCGTAACTTGAAAGTATTTCGATTTCTTGGCT |
| | | TTATATATCTTGTGGAAAGGACGAAACACCTGAATTTCTACTGTTGTAGATGCGGATG |
| | | TTCCAATCAGTACGCGGCCGGCATGGTCCCAGCCTCCTCGCTGGCGCCGGCTGGGCA |
| | | ACATGCTTCGGCATGGCGAATGGGAC (SEQ ID NO: 1050) |
| ID406 | FANCF | AAGGTCGGGCAGGAAGAGGGCCTATTTCCCATGATTCCTTCATATTTGCATATACGAT |
| | site 2 | ACAAGGCTGTTAGAGAGATAATTAGAATTAATTTGACTGTAAACACAAAGATATTAGT |
| | | ACAAAATACGTGACGTAGAAAGTAATAATTTCTTGGGTAGTTTGCAGTTTTAAAATTA |
| | | TGTTTTAAAATGGACTATCATATGCTTACCGTAACTTGAAAGTATTTCGATTTCTTGGCT |
| | | TTATATATCTTGTGGAAAGGACGAAACACCTAAATTTCTACTGTTGTAGATGCGGATG |
| | | TTCCAATCAGTACGCGGCCGGCATGGTCCCAGCCTCCTCGCTGGCGCCGGCTGGGCA |
| | | ACATGCTTCGGCATGGCGAATGGGAC (SEQ ID NO: 1051) |
| ID407 | FANCF | AAGGTCGGGCAGGAAGAGGGCCTATTTCCCATGATTCCTTCATATTTGCATATACGAT |
| | site 2 | ACAAGGCTGTTAGAGAGATAATTAGAATTAATTTGACTGTAAACACAAAGATATTAGT |
| | | ACAAAATACGTGACGTAGAAAGTAATAATTTCTTGGGTAGTTTGCAGTTTTAAAATTA |
| | | TGTTTTAAAATGGACTATCATATGCTTACCGTAACTTGAAAGTATTTCGATTTCTTGGCT |
| | | TTATATATCTTGTGGAAAGGACGAAACACCAAAATTTCTACTATTGTAGATGCGGATG |
| | | TTCCAATCAGTACGCGGCCGGCATGGTCCCAGCCTCCTCGCTGGCGCCGGCTGGGCA |
| | | ACATGCTTCGGCATGGCGAATGGGAC (SEQ ID NO: 1049) |
| ID408 | FANCF | AAGGTCGGGCAGGAAGAGGGCCTATTTCCCATGATTCCTTCATATTTGCATATACGAT |
| | site 2 | ACAAGGCTGTTAGAGAGATAATTAGAATTAATTTGACTGTAAACACAAAGATATTAGT |
| | | ACAAAATACGTGACGTAGAAAGTAATAATTTCTTGGGTAGTTTGCAGTTTTAAAATTA |
| | | TGTTTTAAAATGGACTATCATATGCTTACCGTAACTTGAAAGTATTTCGATTTCTTGGCT |
| | | TTATATATCTTGTGGAAAGGACGAAACACCAAAATTTCTGCTATTGCAGATGCGGATG |
| | | TTCCAATCAGTACGCGGCCGGCATGGTCCCAGCCTCCTCGCTGGCGCCGGCTGGGCA |
| | | ACATGCTTCGGCATGGCGAATGGGAC (SEQ ID NO: 1052) |
| ID410 | FANCF | AAGGTCGGGCAGGAAGAGGGCCTATTTCCCATGATTCCTTCATATTTGCATATACGAT |
| | site 2 | ACAAGGCTGTTAGAGAGATAATTAGAATTAATTTGACTGTAAACACAAAGATATTAGT |
| | | ACAAAATACGTGACGTAGAAAGTAATAATTTCTTGGGTAGTTTGCAGTTTTAAAATTA |
| | | TGTTTTAAAATGGACTATCATATGCTTACCGTAACTTGAAAGTATTTCGATTTCTTGGCT |
| | | TTATATATCTTGTGGAAAGGACGAAACACCATAATTTCTACTATCGTAGATGCGGATG |
| | | TTCCAATCAGTACGCGGCCGGCATGGTCCCAGCCTCCTCGCTGGCGCCGGCTGGGCA |
| | | ACATGCTTCGGCATGGCGAATGGGAC (SEQ ID NO: 1053) |
| ID411 | FANCF | AAGGTCGGGCAGGAAGAGGGCCTATTTCCCATGATTCCTTCATATTTGCATATACGAT |
| | site 2 | ACAAGGCTGTTAGAGAGATAATTAGAATTAATTTGACTGTAAACACAAAGATATTAGT |
| | | ACAAAATACGTGACGTAGAAAGTAATAATTTCTTGGGTAGTTTGCAGTTTTAAAATTA |
| | | TGTTTTAAAATGGACTATCATATGCTTACCGTAACTTGAAAGTATTTCGATTTCTTGGCT |
| | | TTATATATCTTGTGGAAAGGACGAAACACCTAAATTTCTACTGTTGTAGATGCGGATG |
| | | TTCCAATCAGTACGCGGCCGGCATGGTCCCAGCCTCCTCGCTGGCGCCGGCTGGGCA |
| | | ACATGCTTCGGCATGGCGAATGGGAC (SEQ ID NO: 1051) |
| ID412 | FANCF | AAGGTCGGGCAGGAAGAGGGCCTATTTCCCATGATTCCTTCATATTTGCATATACGAT |
| | site 2 | ACAAGGCTGTTAGAGAGATAATTAGAATTAATTTGACTGTAAACACAAAGATATTAGT |
| | | ACAAAATACGTGACGTAGAAAGTAATAATTTCTTGGGTAGTTTGCAGTTTTAAAATTA |
| | | TGTTTTAAAATGGACTATCATATGCTTACCGTAACTTGAAAGTATTTCGATTTCTTGGCT |
| | | TTATATATCTTGTGGAAAGGACGAAACACCTTAATTTCTACTATTGTAGATGCGGATGT |
| | | TCCAATCAGTACGCGGCCGGCATGGTCCCAGCCTCCTCGCTGGCGCCGGCTGGGCAA |
| | | CATGCTTCGGCATGGCGAATGGGAC (SEQ ID NO: 1054) |
| ID413 | FANCF | AAGGTCGGGCAGGAAGAGGGCCTATTTCCCATGATTCCTTCATATTTGCATATACGAT |
| | site 2 | ACAAGGCTGTTAGAGAGATAATTAGAATTAATTTGACTGTAAACACAAAGATATTAGT |
| | | ACAAAATACGTGACGTAGAAAGTAATAATTTCTTGGGTAGTTTGCAGTTTTAAAATTA |
| | | TGTTTTAAAATGGACTATCATATGCTTACCGTAACTTGAAAGTATTTCGATTTCTTGGCT |
| | | TTATATATCTTGTGGAAAGGACGAAACACCATAATTTCTACTATTGTAGATGCGGATG |
| | | TTCCAATCAGTACGCGGCCGGCATGGTCCCAGCCTCCTCGCTGGCGCCGGCTGGGCA |
| | | ACATGCTTCGGCATGGCGAATGGGAC (SEQ ID NO: 1055) |
| ID414 | FANCF | AAGGTCGGGCAGGAAGAGGGCCTATTTCCCATGATTCCTTCATATTTGCATATACGAT |
| | site 2 | ACAAGGCTGTTAGAGAGATAATTAGAATTAATTTGACTGTAAACACAAAGATATTAGT |
| | | ACAAAATACGTGACGTAGAAAGTAATAATTTCTTGGGTAGTTTGCAGTTTTAAAATTA |
| | | TGTTTTAAAATGGACTATCATATGCTTACCGTAACTTGAAAGTATTTCGATTTCTTGGCT |
| | | TTATATATCTTGTGGAAAGGACGAAACACCATAATTTCTACTGTTGTAGATGCGGATG |
| | | TTCCAATCAGTACGCGGCCGGCATGGTCCCAGCCTCCTCGCTGGCGCCGGCTGGGCA |
| | | ACATGCTTCGGCATGGCGAATGGGAC (SEQ ID NO: 1056) |
| ID415 | FANCF | AAGGTCGGGCAGGAAGAGGGCCTATTTCCCATGATTCCTTCATATTTGCATATACGAT |
| | site 2 | ACAAGGCTGTTAGAGAGATAATTAGAATTAATTTGACTGTAAACACAAAGATATTAGT |
| | | ACAAAATACGTGACGTAGAAAGTAATAATTTCTTGGGTAGTTTGCAGTTTTAAAATTA |
| | | TGTTTTAAAATGGACTATCATATGCTTACCGTAACTTGAAAGTATTTCGATTTCTTGGCT |
| | | TTATATATCTTGTGGAAAGGACGAAACACCTTAATTTCTACTCTCGTAGATGCGGATGT |
| | | TCCAATCAGTACGCGGCCGGCATGGTCCCAGCCTCCTCGCTGGCGCCGGCTGGGCAA |
| | | CATGCTTCGGCATGGCGAATGGGAC (SEQ ID NO: 1057) |
| ID417 | FANCF | AAGGTCGGGCAGGAAGAGGGCCTATTTCCCATGATTCCTTCATATTTGCATATACGAT |
| | site 2 | ACAAGGCTGTTAGAGAGATAATTAGAATTAATTTGACTGTAAACACAAAGATATTAGT |
| | | ACAAAATACGTGACGTAGAAAGTAATAATTTCTTGGGTAGTTTGCAGTTTTAAAATTA |
| | | TGTTTTAAAATGGACTATCATATGCTTACCGTAACTTGAAAGTATTTCGATTTCTTGGCT |
| | | TTATATATCTTGTGGAAAGGACGAAACACCTAAATTTCTACTGTTGTAGATGCGGATG |
| | | TTCCAATCAGTACGCGGCCGGCATGGTCCCAGCCTCCTCGCTGGCGCCGGCTGGGCA |
| | | ACATGCTTCGGCATGGCGAATGGGAC (SEQ ID NO: 1051) |
| ID418 | FANCF | AAGGTCGGGCAGGAAGAGGGCCTATTTCCCATGATTCCTTCATATTTGCATATACGAT |
| | site 2 | ACAAGGCTGTTAGAGAGATAATTAGAATTAATTTGACTGTAAACACAAAGATATTAGT |
| | | ACAAAATACGTGACGTAGAAAGTAATAATTTCTTGGGTAGTTTGCAGTTTTAAAATTA |
| | | TGTTTTAAAATGGACTATCATATGCTTACCGTAACTTGAAAGTATTTCGATTTCTTGGCT |
| | | TTATATATCTTGTGGAAAGGACGAAACACCTAAATTTCTACTATTGTAGATGCGGATG |
| | | TTCCAATCAGTACGCGGCCGGCATGGTCCCAGCCTCCTCGCTGGCGCCGGCTGGGCA |
| | | ACATGCTTCGGCATGGCGAATGGGAC (SEQ ID NO: 1058) |
| ID419 | FANCF | AAGGTCGGGCAGGAAGAGGGCCTATTTCCCATGATTCCTTCATATTTGCATATACGAT |
| | site 2 | ACAAGGCTGTTAGAGAGATAATTAGAATTAATTTGACTGTAAACACAAAGATATTAGT |
| | | ACAAAATACGTGACGTAGAAAGTAATAATTTCTTGGGTAGTTTGCAGTTTTAAAATTA |
| | | TGTTTTAAAATGGACTATCATATGCTTACCGTAACTTGAAAGTATTTCGATTTCTTGGCT |
| | | TTATATATCTTGTGGAAAGGACGAAACACCAGAATTTCTACTGTTGTAGATGCGGATG |
| | | TTCCAATCAGTACGCGGCCGGCATGGTCCCAGCCTCCTCGCTGGCGCCGGCTGGGCA |
| | | ACATGCTTCGGCATGGCGAATGGGAC (SEQ ID NO: 1047) |
| ID420 | FANCF | AAGGTCGGGCAGGAAGAGGGCCTATTTCCCATGATTCCTTCATATTTGCATATACGAT |
| | site 2 | ACAAGGCTGTTAGAGAGATAATTAGAATTAATTTGACTGTAAACACAAAGATATTAGT |
| | | ACAAAATACGTGACGTAGAAAGTAATAATTTCTTGGGTAGTTTGCAGTTTTAAAATTA |
| | | TGTTTTAAAATGGACTATCATATGCTTACCGTAACTTGAAAGTATTTCGATTTCTTGGCT |
| | | TTATATATCTTGTGGAAAGGACGAAACACCATAATTTCTACTATTGTAGATGCGGATG |
| | | TTCCAATCAGTACGCGGCCGGCATGGTCCCAGCCTCCTCGCTGGCGCCGGCTGGGCA |
| | | ACATGCTTCGGCATGGCGAATGGGAC (SEQ ID NO: 1055) |
| ID421 | FANCF | AAGGTCGGGCAGGAAGAGGGCCTATTTCCCATGATTCCTTCATATTTGCATATACGAT |
| | site 2 | ACAAGGCTGTTAGAGAGATAATTAGAATTAATTTGACTGTAAACACAAAGATATTAGT |
| | | ACAAAATACGTGACGTAGAAAGTAATAATTTCTTGGGTAGTTTGCAGTTTTAAAATTA |
| | | TGTTTTAAAATGGACTATCATATGCTTACCGTAACTTGAAAGTATTTCGATTTCTTGGCT |
| | | TTATATATCTTGTGGAAAGGACGAAACACCATAATTTCTACTATTGTAGATGCGGATG |
| | | TTCCAATCAGTACGCGGCCGGCATGGTCCCAGCCTCCTCGCTGGCGCCGGCTGGGCA |
| | | ACATGCTTCGGCATGGCGAATGGGAC (SEQ ID NO: 1055) |
| ID422 | FANCF | AAGGTCGGGCAGGAAGAGGGCCTATTTCCCATGATTCCTTCATATTTGCATATACGAT |
| | site 2 | ACAAGGCTGTTAGAGAGATAATTAGAATTAATTTGACTGTAAACACAAAGATATTAGT |
| | | ACAAAATACGTGACGTAGAAAGTAATAATTTCTTGGGTAGTTTGCAGTTTTAAAATTA |
| | | TGTTTTAAAATGGACTATCATATGCTTACCGTAACTTGAAAGTATTTCGATTTCTTGGCT |
| | | TTATATATCTTGTGGAAAGGACGAAACACCAAAATTTCTACTATTGTAGATGCGGATG |
| | | TTCCAATCAGTACGCGGCCGGCATGGTCCCAGCCTCCTCGCTGGCGCCGGCTGGGCA |
| | | ACATGCTTCGGCATGGCGAATGGGAC (SEQ ID NO: 1049) |
| ID424 | FANCF | AAGGTCGGGCAGGAAGAGGGCCTATTTCCCATGATTCCTTCATATTTGCATATACGAT |
| | site 2 | ACAAGGCTGTTAGAGAGATAATTAGAATTAATTTGACTGTAAACACAAAGATATTAGT |
| | | ACAAAATACGTGACGTAGAAAGTAATAATTTCTTGGGTAGTTTGCAGTTTTAAAATTA |
| | | TGTTTTAAAATGGACTATCATATGCTTACCGTAACTTGAAAGTATTTCGATTTCTTGGCT |
| | | TTATATATCTTGTGGAAAGGACGAAACACCATAATTTCTACTATTGTAGATGCGGATG |
| | | TTCCAATCAGTACGCGGCCGGCATGGTCCCAGCCTCCTCGCTGGCGCCGGCTGGGCA |
| | | ACATGCTTCGGCATGGCGAATGGGAC (SEQ ID NO: 1055) |
| ID425 | FANCF | AAGGTCGGGCAGGAAGAGGGCCTATTTCCCATGATTCCTTCATATTTGCATATACGAT |
| | site 2 | ACAAGGCTGTTAGAGAGATAATTAGAATTAATTTGACTGTAAACACAAAGATATTAGT |
| | | ACAAAATACGTGACGTAGAAAGTAATAATTTCTTGGGTAGTTTGCAGTTTTAAAATTA |
| | | TGTTTTAAAATGGACTATCATATGCTTACCGTAACTTGAAAGTATTTCGATTTCTTGGCT |
| | | TTATATATCTTGTGGAAAGGACGAAACACCTAAATTTCTACTATTGTAGATGCGGATG |
| | | TTCCAATCAGTACGCGGCCGGCATGGTCCCAGCCTCCTCGCTGGCGCCGGCTGGGCA |
| | | ACATGCTTCGGCATGGCGAATGGGAC (SEQ ID NO: 1058) |
| ID426 | FANCF | AAGGTCGGGCAGGAAGAGGGCCTATTTCCCATGATTCCTTCATATTTGCATATACGAT |
| | site 2 | ACAAGGCTGTTAGAGAGATAATTAGAATTAATTTGACTGTAAACACAAAGATATTAGT |
| | | ACAAAATACGTGACGTAGAAAGTAATAATTTCTTGGGTAGTTTGCAGTTTTAAAATTA |
| | | TGTTTTAAAATGGACTATCATATGCTTACCGTAACTTGAAAGTATTTCGATTTCTTGGCT |
| | | TTATATATCTTGTGGAAAGGACGAAACACCTCAATTTCTACTGTTGTAGATGCGGATG |
| | | TTCCAATCAGTACGCGGCCGGCATGGTCCCAGCCTCCTCGCTGGCGCCGGCTGGGCA |
| | | ACATGCTTCGGCATGGCGAATGGGAC (SEQ ID NO: 1059) |
| ID427 | FANCF | AAGGTCGGGCAGGAAGAGGGCCTATTTCCCATGATTCCTTCATATTTGCATATACGAT |
| | site 2 | ACAAGGCTGTTAGAGAGATAATTAGAATTAATTTGACTGTAAACACAAAGATATTAGT |
| | | ACAAAATACGTGACGTAGAAAGTAATAATTTCTTGGGTAGTTTGCAGTTTTAAAATTA |
| | | TGTTTTAAAATGGACTATCATATGCTTACCGTAACTTGAAAGTATTTCGATTTCTTGGCT |
| | | TTATATATCTTGTGGAAAGGACGAAACACCAAAATTTCTACTATTGTAGATGCGGATG |
| | | TTCCAATCAGTACGCGGCCGGCATGGTCCCAGCCTCCTCGCTGGCGCCGGCTGGGCA |
| | | ACATGCTTCGGCATGGCGAATGGGAC (SEQ ID NO: 1049) |
| ID429 | FANCF | AAGGTCGGGCAGGAAGAGGGCCTATTTCCCATGATTCCTTCATATTTGCATATACGAT |
| | site 2 | ACAAGGCTGTTAGAGAGATAATTAGAATTAATTTGACTGTAAACACAAAGATATTAGT |
| | | ACAAAATACGTGACGTAGAAAGTAATAATTTCTTGGGTAGTTTGCAGTTTTAAAATTA |
| | | TGTTTTAAAATGGACTATCATATGCTTACCGTAACTTGAAAGTATTTCGATTTCTTGGCT |
| | | TTATATATCTTGTGGAAAGGACGAAACACCATAATTTCTACTGTTGTAGATGCGGATG |
| | | TTCCAATCAGTACGCGGCCGGCATGGTCCCAGCCTCCTCGCTGGCGCCGGCTGGGCA |
| | | ACATGCTTCGGCATGGCGAATGGGAC (SEQ ID NO: 1056) |
| ID432 | FANCF | AAGGTCGGGCAGGAAGAGGGCCTATTTCCCATGATTCCTTCATATTTGCATATACGAT |
| | site 2 | ACAAGGCTGTTAGAGAGATAATTAGAATTAATTTGACTGTAAACACAAAGATATTAGT |
| | | ACAAAATACGTGACGTAGAAAGTAATAATTTCTTGGGTAGTTTGCAGTTTTAAAATTA |
| | | TGTTTTAAAATGGACTATCATATGCTTACCGTAACTTGAAAGTATTTCGATTTCTTGGCT |
| | | TTATATATCTTGTGGAAAGGACGAAACACCATAATTTCTACTGTTGTAGATGCGGATG |
| | | TTCCAATCAGTACGCGGCCGGCATGGTCCCAGCCTCCTCGCTGGCGCCGGCTGGGCA |
| | | ACATGCTTCGGCATGGCGAATGGGAC (SEQ ID NO: 1056) |

TABLE S4
crRNA sequences HEK293T

| Cas12a | | |
|---|---|---|
| nuclease | Target | CRNA sequence |
| LbaCas 12a | DNMT1 | UAAUUUCUACUAAGUGUAGAUCCUCACUCCUGCUCGGUGAAUUU |
| | | (SEQ ID NO: 857) |
| ID401 | DNMT1 | AGAAUUUCUACUGUUGUAGAUCCUCACUCCUGCUCGGUGAAUUU |
| | | (SEQ ID NO: 858) |
| ID402 | DNMT1 | AAAAUUUCUACUCUUGUAGAUCCUCACUCCUGCUCGGUGAAUUU |
| | | (SEQ ID NO: 859) |
| ID403 | DNMT1 | AAAAUUUCUACUAUUGUAGAUCCUCACUCCUGCUCGGUGAAUUU |
| | | (SEQ ID NO: 860) |
| ID404 | DNMT1 | AAAAUUUCUACUCUUGUAGAUCCUCACUCCUGCUCGGUGAAUUU |
| | | (SEQ ID NO: 859) |
| ID405 | DNMT1 | UGAAUUUCUACUGUUGUAGAUCCUCACUCCUGCUCGGUGAAUUU |
| | | (SEQ ID NO: 861) |
| ID406 | DNMT1 | UAAAUUUCUACUGUUGUAGAUCCUCACUCCUGCUCGGUGAAUUU |
| | | (SEQ ID NO: 862) |
| ID407 | DNMT1 | AAAAUUUCUACUAUUGUAGAUCCUCACUCCUGCUCGGUGAAUUU |
| | | (SEQ ID NO: 860) |
| ID408 | DNMT1 | AAAAUUUCUGCUAUUGCAGAUCCUCACUCCUGCUCGGUGAAUUU |
| | | (SEQ ID NO: 863) |
| ID409 | DNMT1_T1 | UAAAUUUCUACUAUUGUAGAUUGGGACUCAGGCGGGUCACCUAC |
| | | (SEQ ID NO: 864) |
| ID409 | DNMT1_T2 | UAAAUUUCUACUAUUGUAGAUAGCAGGCACCUGCCUCAGCUGCU |
| | | (SEQ ID NO: 792) |
| ID409 | DNMT1_T3 | UAAAUUUCUACUAUUGUAGAUAGGCGGGUCACCUACCCACGUUC |
| | | (SEQ ID NO: 793) |
| ID409 | DNMT1_T4 | UAAAUUUCUACUAUUGUAGAUACUCCUGCUCGGUGAAUUUGGCU |
| | | (SEQ ID NO: 865) |
| ID410 | DNMT1 | AUAAUUUCUACUAUCGUAGAUCCUCACUCCUGCUCGGUGAAUUU |
| | | (SEQ ID NO: 866) |
| ID411 | DNMT1 | UAAAUUUCUACUGUUGUAGAUCCUCACUCCUGCUCGGUGAAUUU |
| | | (SEQ ID NO: 862) |
| ID412 | DNMT1 | UUAAUUUCUACUAUUGUAGAUCCUCACUCCUGCUCGGUGAAUUU |
| | | (SEQ ID NO: 867) |
| ID413 | DNMT1 | AUAAUUUCUACUAUUGUAGAUCCUCACUCCUGCUCGGUGAAUUU |
| | | (SEQ ID NO: 868) |
| ID414 | DNMT1 | AUAAUUUCUACUGUUGUAGAUCCUCACUCCUGCUCGGUGAAUUU |
| | | (SEQ ID NO: 869) |
| ID415 | DNMT1 | UUAAUUUCUACUCUCGUAGAUCCUCACUCCUGCUCGGUGAAUUU |
| | | (SEQ ID NO: 870) |
| ID416 | DNMT1_T1 | AUAAUUUCUACUAUCGUAGAUGGCUCUGGGACUCAGGCGGGUCA |
| | | (SEQ ID NO: 871) |
| ID416 | DNMT1_T2 | AUAAUUUCUACUAUCGUAGAUGCUCAGCAGGCACCUGCCUCAGC |
| | | (SEQ ID NO: 872) |
| ID417 | DNMT1 | UAAAUUUCUACUGUUGUAGAUCCUCACUCCUGCUCGGUGAAUUU |
| | | (SEQ ID NO: 862) |
| ID418 | DNMT1 | UAAAUUUCUACUAUUGUAGAUCCUCACUCCUGCUCGGUGAAUUU |
| | | (SEQ ID NO: 873) |
| ID419 | DNMT1 | AGAAUUUCUACUGUUGUAGAUCCUCACUCCUGCUCGGUGAAUUU |
| | | (SEQ ID NO: 858) |
| ID420 | DNMT1 | AUAAUUUCUACUAUUGUAGAUCCUCACUCCUGCUCGGUGAAUUU |
| | | (SEQ ID NO: 868) |
| ID421 | DNMT1 | AUAAUUUCUACUAUUGUAGAUCCUCACUCCUGCUCGGUGAAUUU |
| | | (SEQ ID NO: 868) |
| ID422 | DNMT1 | AAAAUUUCUACUAUUGUAGAUCCUCACUCCUGCUCGGUGAAUUU |
| | | (SEQ ID NO: 860) |
| ID423 | DNMT1_T1 | GAAAUUUCUACUAUCGUAGAUCCUCACUCCUGCUCGGUGAAUUU |
| | | (SEQ ID NO: 874) |
| ID423 | DNMT1_T2 | GAAAUUUCUACUAUCGUAGAUCUGAUGGUCCAUGUCUGUUACUC |
| | | (SEQ ID NO: 875) |
| ID424 | DNMT1 | AUAAUUUCUACUAUUGUAGAUCCUCACUCCUGCUCGGUGAAUUU |
| | | (SEQ ID NO: 868) |
| ID425 | DNMT1 | UAAAUUUCUACUAUUGUAGAUCCUCACUCCUGCUCGGUGAAUUU |
| | | (SEQ ID NO: 873) |
| ID426 | DNMT1 | UCAAUUUCUACUGUUGUAGAUCCUCACUCCUGCUCGGUGAAUUU |
| | | (SEQ ID NO: 876) |
| ID427 | DNMT1 | AAAAUUUCUACUAUUGUAGAUCCUCACUCCUGCUCGGUGAAUUU |
| | | (SEQ ID NO: 860) |
| ID428 | DNMT1_T1 | UAAAUUUCUACUAUUGUAGAUUGGGACUCAGGCGGGUCACCUAC |
| | | (SEQ ID NO: 864) |
| ID428 | DNMT1_T2 | UAAAUUUCUACUAUUGUAGAUAGGCGGGUCACCUACCCACGUUC |
| | | (SEQ ID NO: 793) |
| ID428 | DNMT1_T3 | UAAAUUUCUACUAUUGUAGAUAGCAGGCACCUGCCUCAGCUGCU |
| | | (SEQ ID NO: 792) |
| ID428 | DNMT1_T4 | UAAAUUUCUACUAUUGUAGAUACUCCUGCUCGGUGAAUUUGGCU |
| | | (SEQ ID NO: 865) |
| ID429 | DNMT1 | AUAAUUUCUACUGUUGUAGAUCCUCACUCCUGCUCGGUGAAUUU |
| | | (SEQ ID NO: 869) |
| ID432 | DNMT1 | AUAAUUUCUACUGUUGUAGAUCCUCACUCCUGCUCGGUGAAUUU |
| | | (SEQ ID NO: 869) |
| ID433 | DNMT1_T1 | AAAAUUUCUGCUAUUGCAGAUACUCCUGCUCGGUGAAUUUGGCU |
| | | (SEQ ID NO: 877) |
| ID433 | DNMT1_T2 | AAAAUUUCUGCUAUUGCAGAUAGCAGGCACCUGCCUCAGCUGCU |
| | | (SEQ ID NO: 794) |
| ID433 | DNMT1_T3 | AAAAUUUCUGCUAUUGCAGAUAGGCGGGUCACCUACCCACGUUC |
| | | (SEQ ID NO: 795) |
| LbaCas12a | RUNX1 | UAAUUUCUACUAAGUGUAGAUCAGGAGGAAGCGAUGGCUUCAG |
| | | (SEQ ID NO: 950) |
| ID401 | RUNX1 | AGAAUUUCUACUGUUGUAGAUCAGGAGGAAGCGAUGGCUUCAG |
| | | (SEQ ID NO: 878) |
| ID402 | RUNX1 | AAAAUUUCUACUCUUGUAGAUCAGGAGGAAGCGAUGGCUUCAG |
| | | (SEQ ID NO: 879) |
| ID403 | RUNXI | AAAAUUUCUACUAUUGUAGAUCAGGAGGAAGCGAUGGCUUCAG |
| | | (SEQ ID NO: 880) |
| ID404 | RUNX1 | AAAAUUUCUACUCUUGUAGAUCAGGAGGAAGCGAUGGCUUCAG |
| | | (SEQ ID NO: 879) |
| ID405 | RUNX1 | UGAAUUUCUACUGUUGUAGAUCAGGAGGAAGCGAUGGCUUCAG |
| | | (SEQ ID NO: 881) |
| ID406 | RUNX1 | UAAAUUUCUACUGUUGUAGAUCAGGAGGAAGCGAUGGCUUCAG |
| | | (SEQ ID NO: 882) |
| ID407 | RUNX1 | AAAAUUUCUACUAUUGUAGAUCAGGAGGAAGCGAUGGCUUCAG |
| | | (SEQ ID NO: 880) |
| ID408 | RUNX1 | AAAAUUUCUGCUAUUGCAGAUCAGGAGGAAGCGAUGGCUUCAG |
| | | (SEQ ID NO: 883) |
| ID409 | RUNX1_T1 | UAAAUUUCUACUAUUGUAGAUAGCUUUGCCUGUAAUGAAAUGGC |
| | | (SEQ ID NO: 884) |
| ID409 | RUNX1_T2 | UAAAUUUCUACUAUUGUAGAUGGUGCAGAGAUGCCUCGGUGCCU |
| | | (SEQ ID NO: 885) |
| ID410 | RUNX1 | AUAAUUUCUACUAUCGUAGAUCAGGAGGAAGCGAUGGCUUCAG |
| | | (SEQ ID NO: 886) |
| ID411 | RUNX1 | UAAAUUUCUACUGUUGUAGAUCAGGAGGAAGCGAUGGCUUCAG |
| | | (SEQ ID NO: 882) |
| ID412 | RUNX1 | UUAAUUUCUACUAUUGUAGAUCAGGAGGAAGCGAUGGCUUCAG |
| | | (SEQ ID NO: 887) |
| ID413 | RUNX1 | AUAAUUUCUACUAUUGUAGAUCAGGAGGAAGCGAUGGCUUCAG |
| | | (SEQ ID NO: 888) |
| ID414 | RUNX1 | AUAAUUUCUACUGUUGUAGAUCAGGAGGAAGCGAUGGCUUCAG |
| | | (SEQ ID NO: 889) |
| ID415 | RUNX1 | UUAAUUUCUACUCUCGUAGAUCAGGAGGAAGCGAUGGCUUCAG |
| | | (SEQ ID NO: 890) |
| ID416 | RUNX1_T1 | AUAAUUUCUACUAUCGUAGAUUUUUUACAAAGGUGCAUUUUUUA |
| | | (SEQ ID NO: 891) |
| ID416 | RUNX1_T2 | AUAAUUUCUACUAUCGUAGAUCUCAGCUUUGCCUGUAAUGAAAU |
| | | (SEQ ID NO: 892) |
| ID417 | RUNX1 | UAAAUUUCUACUGUUGUAGAUCAGGAGGAAGCGAUGGCUUCAG |
| | | (SEQ ID NO: 882) |
| ID418 | RUNX1 | UAAAUUUCUACUAUUGUAGAUCAGGAGGAAGCGAUGGCUUCAG |
| | | (SEQ ID NO: 893) |
| ID419 | RUNX1 | AGAAUUUCUACUGUUGUAGAUCAGGAGGAAGCGAUGGCUUCAG |
| | | (SEQ ID NO: 878) |
| ID420 | RUNX1 | AUAAUUUCUACUAUUGUAGAUCAGGAGGAAGCGAUGGCUUCAG |
| | | (SEQ ID NO: 888) |
| ID421 | RUNX1 | AUAAUUUCUACUAUUGUAGAUCAGGAGGAAGCGAUGGCUUCAG |
| | | (SEQ ID NO: 888) |
| ID422 | RUNX1 | AAAAUUUCUACUAUUGUAGAUCAGGAGGAAGCGAUGGCUUCAG |
| | | (SEQ ID NO: 880) |
| ID423 | RUNX1_T1 | GAAAUUUCUACUAUCGUAGAUAGACAGCAUAUUUGAGUCAUUUC |
| | | (SEQ ID NO: 894) |
| ID423 | RUNX1_T2 | GAAAUUUCUACUAUCGUAGAUACCUCGGUGCAGAGAUGCCUCGG |
| | | (SEQ ID NO: 895) |
| ID424 | RUNX1 | AUAAUUUCUACUAUUGUAGAUCAGGAGGAAGCGAUGGCUUCAG |
| | | (SEQ ID NO: 888) |
| ID425 | RUNX1 | UAAAUUUCUACUAUUGUAGAUCAGGAGGAAGCGAUGGCUUCAG |
| | | (SEQ ID NO: 893) |
| ID426 | RUNX1 | UCAAUUUCUACUGUUGUAGAUCAGGAGGAAGCGAUGGCUUCAG |
| | | (SEQ ID NO: 896) |
| ID427 | RUNX1 | AAAAUUUCUACUAUUGUAGAUCAGGAGGAAGCGAUGGCUUCAG |
| | | (SEQ ID NO: 880) |
| ID428 | RUNX1 | UAAAUUUCUACUAUUGUAGAUCAGGAGGAAGCGAUGGCUUCAG |
| | | (SEQ ID NO: 893) |
| ID429 | RUNX1 | AUAAUUUCUACUGUUGUAGAUCAGGAGGAAGCGAUGGCUUCAG |
| | | (SEQ ID NO: 889) |
| ID432 | RUNX1 | AUAAUUUCUACUGUUGUAGAUCAGGAGGAAGCGAUGGCUUCAG |
| | | (SEQ ID NO: 889) |
| ID433 | RUNX1_T1 | AAAAUUUCUGCUAUUGCAGAUAGCUUUGCCUGUAAUGAAAUGGC |
| | | (SEQ ID NO: 897) |
| ID433 | RUNX1_T2 | AAAAUUUCUGCUAUUGCAGAUGGUGCAGAGAUGCCUCGGUGCCU |
| | | (SEQ ID NO: 898) |
| LbaCas12a | SCN1A | UAAUUUCUACUAAGUGUAGAUCUCCAUCUUGUCAUCCUGCA |
| | | (SEQ ID NO: 899) |
| ID401 | SCN1A | AGAAUUUCUACUGUUGUAGAUCUCCAUCUUGUCAUCCUGCA |
| | | (SEQ ID NO: 900) |
| ID402 | SCN1A | AAAAUUUCUACUCUUGUAGAUCUCCAUCUUGUCAUCCUGCA |
| | | (SEQ ID NO: 901) |
| ID403 | SCN1A | AAAAUUUCUACUAUUGUAGAUCUCCAUCUUGUCAUCCUGCA |
| | | (SEQ ID NO: 902) |
| ID404 | SCN1A | AAAAUUUCUACUCUUGUAGAUCUCCAUCUUGUCAUCCUGCA |
| | | (SEQ ID NO: 901) |
| ID405 | SCN1A | UGAAUUUCUACUGUUGUAGAUCUCCAUCUUGUCAUCCUGCA |
| | | (SEQ ID NO: 903) |
| ID406 | SCN1A | UAAAUUUCUACUGUUGUAGAUCUCCAUCUUGUCAUCCUGCA |
| | | (SEQ ID NO: 904) |
| ID407 | SCN1A | AAAAUUUCUACUAUUGUAGAUCUCCAUCUUGUCAUCCUGCA |
| | | (SEQ ID NO: 902) |
| ID408 | SCN1A | AAAAUUUCUGCUAUUGCAGAUCUCCAUCUUGUCAUCCUGCA |
| | | (SEQ ID NO: 905) |
| ID409 | SCN1A_T1 | UAAAUUUCUACUAUUGUAGAUUGGUGAAGAAGUUGAAGCUGUCA |
| | | (SEQ ID NO: 796) |
| ID409 | SCN1A_T2 | UAAAUUUCUACUAUUGUAGAUCAUCUUGUCAUCCUGCACAUUUU |
| | | (SEQ ID NO: 797) |
| ID410 | SCN1A | AUAAUUUCUACUAUCGUAGAUCUCCAUCUUGUCAUCCUGCA |
| | | (SEQ ID NO: 906) |
| ID411 | SCN1A | UAAAUUUCUACUGUUGUAGAUCUCCAUCUUGUCAUCCUGCA |
| | | (SEQ ID NO: 904) |
| ID412 | SCN1A | UUAAUUUCUACUAUUGUAGAUCUCCAUCUUGUCAUCCUGCA |
| | | (SEQ ID NO: 907) |
| ID413 | SCN1A | AUAAUUUCUACUAUUGUAGAUCUCCAUCUUGUCAUCCUGCA |
| | | (SEQ ID NO: 908) |
| ID414 | SCN1A | AUAAUUUCUACUGUUGUAGAUCUCCAUCUUGUCAUCCUGCA |
| | | (SEQ ID NO: 909) |
| ID415 | SCN1A | UUAAUUUCUACUCUCGUAGAUCUCCAUCUUGUCAUCCUGCA |
| | | (SEQ ID NO: 910) |
| ID416 | SCN1A | AUAAUUUCUACUAUCGUAGAUCUCCAUCUUGUCAUCCUGCA |
| | | (SEQ ID NO: 906) |
| ID417 | SCN1A | UAAAUUUCUACUGUUGUAGAUCUCCAUCUUGUCAUCCUGCA |
| | | (SEQ ID NO: 904) |
| ID418 | SCN1A | UAAAUUUCUACUAUUGUAGAUCUCCAUCUUGUCAUCCUGCA |
| | | (SEQ ID NO: 911) |
| ID419 | SCN1A | AGAAUUUCUACUGUUGUAGAUCUCCAUCUUGUCAUCCUGCA |
| | | (SEQ ID NO: 900) |
| ID420 | SCN1A | AUAAUUUCUACUAUUGUAGAUCUCCAUCUUGUCAUCCUGCA |
| | | (SEQ ID NO: 908) |
| ID421 | SCN1A | AUAAUUUCUACUAUUGUAGAUCUCCAUCUUGUCAUCCUGCA |
| | | (SEQ ID NO: 908) |
| ID422 | SCN1A | AAAAUUUCUACUAUUGUAGAUCUCCAUCUUGUCAUCCUGCA |
| | | (SEQ ID NO: 902) |
| ID423 | SCN1A_T1 | GAAAUUUCUACUAUCGUAGAUUUUGCCUUUUCUUCUGCAAUGCG |
| | | (SEQ ID NO: 912) |
| ID423 | SCN1A_T2 | GAAAUUUCUACUAUCGUAGAUUCUGGUGAAGAAGUUGAAGCUGU |
| | | (SEQ ID NO: 913) |
| ID424 | SCN1A | AUAAUUUCUACUAUUGUAGAUCUCCAUCUUGUCAUCCUGCA |
| | | (SEQ ID NO: 908) |
| ID425 | SCN1A | UAAAUUUCUACUAUUGUAGAUCUCCAUCUUGUCAUCCUGCA |
| | | (SEQ ID NO: 911) |
| ID426 | SCN1A | UCAAUUUCUACUGUUGUAGAUCUCCAUCUUGUCAUCCUGCA |
| | | (SEQ ID NO: 914) |
| ID427 | SCN1A | AAAAUUUCUACUAUUGUAGAUCUCCAUCUUGUCAUCCUGCA |
| | | (SEQ ID NO: 902) |
| ID428 | SCN1A | UAAAUUUCUACUAUUGUAGAUCUCCAUCUUGUCAUCCUGCA |
| | | (SEQ ID NO: 911) |
| ID429 | SCN1A | AUAAUUUCUACUGUUGUAGAUCUCCAUCUUGUCAUCCUGCA |
| | | (SEQ ID NO: 909) |
| ID432 | SCN1A | AUAAUUUCUACUGUUGUAGAUCUCCAUCUUGUCAUCCUGCA |
| | | (SEQ ID NO: 909) |
| ID433 | SCN1A_T1 | AAAAUUUCUGCUAUUGCAGAUUGGUGAAGAAGUUGAAGCUGUCA |
| | | (SEQ ID NO: 798) |
| ID433 | SCN1A_T2 | AAAAUUUCUGCUAUUGCAGAUCAUCUUGUCAUCCUGCACAUUUU |
| | | (SEQ ID NO: 799) |
| LbaCas12a | FANCF site 1 | UAAUUUCUACUAAGUGUAGAUGUCGGCAUGGCCCCAUUCGCACG |
| | | (SEQ ID NO: 915) |
| ID401 | FANCF site 1 | AGAAUUUCUACUGUUGUAGAUGUCGGCAUGGCCCCAUUCGCACG |
| | | (SEQ ID NO: 916) |
| ID402 | FANCF site 1 | AAAAUUUCUACUCUUGUAGAUGUCGGCAUGGCCCCAUUCGCACG |
| | | (SEQ ID NO: 917) |
| ID403 | FANCF site 1 | AAAAUUUCUACUAUUGUAGAUGUCGGCAUGGCCCCAUUCGCACG |
| | | (SEQ ID NO: 918) |
| ID404 | FANCF site 1 | AAAAUUUCUACUCUUGUAGAUGUCGGCAUGGCCCCAUUCGCACG |
| | | (SEQ ID NO: 917) |
| ID405 | FANCF site 1 | UGAAUUUCUACUGUUGUAGAUGUCGGCAUGGCCCCAUUCGCACG |
| | | (SEQ ID NO: 919) |
| ID406 | FANCF site 1 | UAAAUUUCUACUGUUGUAGAUGUCGGCAUGGCCCCAUUCGCACG |
| | | (SEQ ID NO: 920) |
| ID407 | FANCF site 1 | AAAAUUUCUACUAUUGUAGAUGUCGGCAUGGCCCCAUUCGCACG |
| | | (SEQ ID NO: 918) |
| ID408 | FANCF site 1 | AAAAUUUCUGCUAUUGCAGAUGUCGGCAUGGCCCCAUUCGCACG |
| | | (SEQ ID NO: 921) |
| ID409 | FANCF site | UAAAUUUCUACUAUUGUAGAUAUGGAAUCCCUUCUGCAGCACCU |
| | 1_T1 | (SEQ ID NO: 922) |
| ID409 | FANCF site | UAAAUUUCUACUAUUGUAGAUAAGCACUACCUACGUCAGCACCU |
| | 1_T2 | (SEQ ID NO: 800) |
| ID410 | FANCF site 1 | AUAAUUUCUACUAUCGUAGAUGUCGGCAUGGCCCCAUUCGCACG |
| | | (SEQ ID NO: 923) |
| ID411 | FANCF site 1 | UAAAUUUCUACUGUUGUAGAUGUCGGCAUGGCCCCAUUCGCACG |
| | | (SEQ ID NO: 920) |
| ID412 | FANCF site 1 | UUAAUUUCUACUAUUGUAGAUGUCGGCAUGGCCCCAUUCGCACG |
| | | (SEQ ID NO: 924) |
| ID413 | FANCF site 1 | AUAAUUUCUACUAUUGUAGAUGUCGGCAUGGCCCCAUUCGCACG |
| | | (SEQ ID NO: 925) |
| ID414 | FANCF site 1 | AUAAUUUCUACUGUUGUAGAUGUCGGCAUGGCCCCAUUCGCACG |
| | | (SEQ ID NO: 926) |
| ID415 | FANCF site 1 | UUAAUUUCUACUCUCGUAGAUGUCGGCAUGGCCCCAUUCGCACG |
| | | (SEQ ID NO: 927) |
| ID416 | FANCF site | AUAAUUUCUACUAUCGUAGAUUCCUAAAAAUUACGAAAACGAAA |
| | 1_T1 | (SEQ ID NO: 928) |
| ID416 | FANCF site | AUAAUUUCUACUAUCGUAGAUAAAAACCUCAACACAGAUUCUAG |
| | 1_T2 | (SEQ ID NO: 929) |
| ID417 | FANCF site 1 | UAAAUUUCUACUGUUGUAGAUGUCGGCAUGGCCCCAUUCGCACG |
| | | (SEQ ID NO: 920) |
| ID418 | FANCF site 1 | UAAAUUUCUACUAUUGUAGAUGUCGGCAUGGCCCCAUUCGCACG |
| | | (SEQ ID NO: 930) |
| ID419 | FANCF site 1 | AGAAUUUCUACUGUUGUAGAUGUCGGCAUGGCCCCAUUCGCACG |
| | | (SEQ ID NO: 916) |
| ID420 | FANCF site 1 | AUAAUUUCUACUAUUGUAGAUGUCGGCAUGGCCCCAUUCGCACG |
| | | (SEQ ID NO: 925) |
| ID421 | FANCF site 1 | AUAAUUUCUACUAUUGUAGAUGUCGGCAUGGCCCCAUUCGCACG |
| | | (SEQ ID NO: 925) |
| ID422 | FANCF site 1 | AAAAUUUCUACUAUUGUAGAUGUCGGCAUGGCCCCAUUCGCACG |
| | | (SEQ ID NO: 918) |
| ID423 | FANCF site | GAAAUUUCUACUAUCGUAGAUAAAUAAUCUGGGCUUCAGUUCUA |
| | 1_T1 | (SEQ ID NO: 931) |
| ID423 | FANCF site | GAAAUUUCUACUAUCGUAGAUCUCACGUCACAGUAUGUCUCUGG |
| | 1_T2 | (SEQ ID NO: 932) |
| ID424 | FANCF site 1 | AUAAUUUCUACUAUUGUAGAUGUCGGCAUGGCCCCAUUCGCACG |
| | | (SEQ ID NO: 925) |
| ID425 | FANCF site 1 | UAAAUUUCUACUAUUGUAGAUGUCGGCAUGGCCCCAUUCGCACG |
| | | (SEQ ID NO: 930) |
| ID426 | FANCF site 1 | UCAAUUUCUACUGUUGUAGAUGUCGGCAUGGCCCCAUUCGCACG |
| | | (SEQ ID NO: 933) |
| ID427 | FANCF site 1 | AAAAUUUCUACUAUUGUAGAUGUCGGCAUGGCCCCAUUCGCACG |
| | | (SEQ ID NO: 918) |
| ID428 | FANCF site | UAAAUUUCUACUAUUGUAGAUUGGCGUUACUUAAUUUUGAAAAA |
| | 1_T1 | (SEQ ID NO: 934) |
| ID428 | FANCF site | UAAAUUUCUACUAUUGUAGAUAAGCACUACCUACGUCAGCACCU |
| | 1_T2 | (SEQ ID NO: 800) |
| ID429 | FANCF site 1 | AUAAUUUCUACUGUUGUAGAUGUCGGCAUGGCCCCAUUCGCACG |
| | | (SEQ ID NO: 926) |
| ID432 | FANCF site 1 | AUAAUUUCUACUGUUGUAGAUGUCGGCAUGGCCCCAUUCGCACG |
| | | (SEQ ID NO: 926) |
| ID433 | FANCF site | AAAAUUUCUGCUAUUGCAGAUUGGCGUUACUUAAUUUUGAAAAA |
| | 1_T1 | (SEQ ID NO: 935) |
| ID433 | FANCF site | AAAAUUUCUGCUAUUGCAGAUAAGCACUACCUACGUCAGCACCU |
| | 1_T2 | (SEQ ID NO: 801) |
| LbaCas12a | FANCF site 2 | UAAUUUCUACUAAGUGUAGAUGCGGAUGUUCCAAUCAGUACGC |
| | | (SEQ ID NO: 936) |
| ID401 | FANCF site 2 | AGAAUUUCUACUGUUGUAGAUGCGGAUGUUCCAAUCAGUACGC |
| | | (SEQ ID NO: 937) |
| ID402 | FANCF site 2 | AAAAUUUCUACUCUUGUAGAUGCGGAUGUUCCAAUCAGUACGC |
| | | (SEQ ID NO: 938) |
| ID403 | FANCF site 2 | AAAAUUUCUACUAUUGUAGAUGCGGAUGUUCCAAUCAGUACGC |
| | | (SEQ ID NO: 939) |
| ID404 | FANCF site 2 | AAAAUUUCUACUCUUGUAGAUGCGGAUGUUCCAAUCAGUACGC |
| | | (SEQ ID NO: 938) |
| ID405 | FANCF site 2 | UGAAUUUCUACUGUUGUAGAUGCGGAUGUUCCAAUCAGUACGC |
| | | (SEQ ID NO: 940) |
| ID406 | FANCF site 2 | UAAAUUUCUACUGUUGUAGAUGCGGAUGUUCCAAUCAGUACGC |
| | | (SEQ ID NO: 941) |
| ID407 | FANCF site 2 | AAAAUUUCUACUAUUGUAGAUGCGGAUGUUCCAAUCAGUACGC |
| | | (SEQ ID NO: 939) |
| ID408 | FANCF site 2 | AAAAUUUCUGCUAUUGCAGAUGCGGAUGUUCCAAUCAGUACGC |
| | | (SEQ ID NO: 942) |
| ID410 | FANCF site 2 | AUAAUUUCUACUAUCGUAGAUGCGGAUGUUCCAAUCAGUACGC |
| | | (SEQ ID NO: 943) |
| ID411 | FANCF site 2 | UAAAUUUCUACUGUUGUAGAUGCGGAUGUUCCAAUCAGUACGC |
| | | (SEQ ID NO: 941) |
| ID412 | FANCF site 2 | UUAAUUUCUACUAUUGUAGAUGCGGAUGUUCCAAUCAGUACGC |
| | | (SEQ ID NO: 944) |
| ID413 | FANCF site 2 | AUAAUUUCUACUAUUGUAGAUGCGGAUGUUCCAAUCAGUACGC |
| | | (SEQ ID NO: 945) |
| ID414 | FANCF site 2 | AUAAUUUCUACUGUUGUAGAUGCGGAUGUUCCAAUCAGUACGC |
| | | (SEQ ID NO: 946) |
| ID415 | FANCF site 2 | UUAAUUUCUACUCUCGUAGAUGCGGAUGUUCCAAUCAGUACGC |
| | | (SEQ ID NO: 947) |
| ID417 | FANCF site 2 | UAAAUUUCUACUGUUGUAGAUGCGGAUGUUCCAAUCAGUACGC |
| | | (SEQ ID NO: 941) |
| ID418 | FANCF site 2 | UAAAUUUCUACUAUUGUAGAUGCGGAUGUUCCAAUCAGUACGC |
| | | (SEQ ID NO: 948) |
| ID419 | FANCF site 2 | AGAAUUUCUACUGUUGUAGAUGCGGAUGUUCCAAUCAGUACGC |
| | | (SEQ ID NO: 937) |
| ID420 | FANCF site 2 | AUAAUUUCUACUAUUGUAGAUGCGGAUGUUCCAAUCAGUACGC |
| | | (SEQ ID NO: 945) |
| ID421 | FANCF site 2 | AUAAUUUCUACUAUUGUAGAUGCGGAUGUUCCAAUCAGUACGC |
| | | (SEQ ID NO: 945) |
| ID422 | FANCF site 2 | AAAAUUUCUACUAUUGUAGAUGCGGAUGUUCCAAUCAGUACGC |
| | | (SEQ ID NO: 939) |
| ID424 | FANCF site 2 | AUAAUUUCUACUAUUGUAGAUGCGGAUGUUCCAAUCAGUACGC |
| | | (SEQ ID NO: 945) |
| ID425 | FANCF site 2 | UAAAUUUCUACUAUUGUAGAUGCGGAUGUUCCAAUCAGUACGC |
| | | (SEQ ID NO: 948) |
| ID426 | FANCF site 2 | UCAAUUUCUACUGUUGUAGAUGCGGAUGUUCCAAUCAGUACGC |
| | | (SEQ ID NO: 949) |
| ID427 | FANCF site 2 | AAAAUUUCUACUAUUGUAGAUGCGGAUGUUCCAAUCAGUACGC |
| | | (SEQ ID NO: 939) |
| ID429 | FANCF site 2 | AUAAUUUCUACUGUUGUAGAUGCGGAUGUUCCAAUCAGUACGC |
| | | (SEQ ID NO: 946) |
| ID432 | FANCF site 2 | AUAAUUUCUACUGUUGUAGAUGCGGAUGUUCCAAUCAGUACGC |
| | | (SEQ ID NO: 946) |

TABLE S5
Primer sequences_T7 Endo I

| Target | Primer | Primer sequence 5′−>3′ |
|---|---|---|
| DNMT1 | DNMT1_dir | GCCAAAGCCCGAGAGAGTG |
| | | (SEQ ID NO: 748) |
| DNMT1 | DNMT1_rev | CCTCACACAACAGCTTCATG |
| | | (SEQ ID NO: 749) |
| RUNX1 | RUNX1_dir | CATCACCAACCCACAGCCAAGG |
| | | (SEQ ID NO: 750) |
| RUNX1 | RUNX1_rev | CCAGCACAACTTACTCGCACTTGAC |
| | | (SEQ ID NO: 751) |
| SCN1A | SCN1A_dir | AGTCCAAGGAATGCAGTAGG |
| | | (SEQ ID NO: 752) |
| SCN1A | SCN1A_rev | GGCACAGTTCCTGTATCAGT |
| | | (SEQ ID NO: 753) |
| FANCF | FANCF1_dir | GCCCTACATCTGCTCTCCCTCC |
| (amplicon 1) | | (SEQ ID NO: 754) |
| FANCF | FANCF1_rev | GGGCCGGGAAAGAGTTGCTG |
| (amplicon 1) | | (SEQ ID NO: 755) |
| FANCF | FANCF2_dir | GCGACATAGGACCTTCTCCTCCC |
| (amplicon 2) | | (SEQ ID NO: 756) |
| FANCF | FANCF2_rev | GGAGGGAGAGCAGATGTAGGGC |
| (amplicon 2) | | (SEQ ID NO: 757) |

TABLE S6
Amplicon sequences

| | | Amplicon |
|---|---|---|
| Target gene | Amplicon sequence (5′−>3′) | size, bp |
| DNMT1 | GCCAAAGCCCGAGAGAGTGCCTCAGGTATGGTGGGGTGGGCCAGGCT | 719 |
| | TCCTCTGGGGCCTGACTGCCCTCTGGGGGTACATGTGGGGGCAGTTGC | |
| | TGGCCACCGTTTTGGGCTCTGGGACTCAGGCGGGTCACCTACCCACGTT | |
| | CGTGGCCCCATCTTTCTCAAGGGGCTGCTGTGAGGATTGAGTGAGTTGC | |
| | ACGTGTCAAGTGCTTAGAGCAGGCGTGCTGCACACAGCAGGCCTTTGG | |
| | TCAGGTTGGCTGCTGGGCTGGCCCTGGGGCCGTTTCCCTCACTCCTGCT | |
| | CGGTGAATTTGGCTCAGCAGGCACCTGCCTCAGCTGCTCACTTGAGCCT | |
| | CTGGGTCTAGAACCCTCTGGGGACCGTTTGAGGAGTGTTCAGTCTCCGT | |
| | GAACGTTCCCTTAGCACTCTGCCACTTATTGGGTCAGCTGTTAACATCAG | |
| | TACGTTAATGTTTCCTGATGGTCCATGTCTGTTACTCGCCTGTCAAGTGG | |
| | CGTGACACCGGGCGTGTTCCCCAGAGTGACTTTTCCTTTTATTTCCCTTC | |
| | AGCTAAAATAAAGGAGGAGGAAGCTGCTAAGGACTAGTTCTGCCCTCC | |
| | CGTCACCCCTGTTTCTGGCACCAGGAATCCCCAACATGCACTGATGTTGT | |
| | GTTTTTAACATGTCAATCTGTCCGTTCACATGTGTGGTACATGGTGTTTG | |
| | TGGCCTTGGCTGACATGAAGCTGTTGTGTGAGG (SEQ ID NO: 951) | |
| RUNX1 | CATCACCAACCCACAGCCAAGGCGGCGCTGGCTTTTTTTTTTTTTTTAAT | 601 |
| | CTTTAACAATTTGAATATTTGTTTTTACAAAGGTGCATTTTTTAATAGGG | |
| | CTTGGGGAGTCCCAGAGGTATCCAGCAGAGGGGAGAAGAAAGAGAGA | |
| | TGTAGGGCTAGAGGGGTGAGGCTGAAACAGTGACCTGTCTTGGTTTTC | |
| | GCTCCGAAGGTAAAAGAAATCATTGAGTCCCCCGCCTTCAGAAGAGGG | |
| | TGCATTTTCAGGAGGAAGCGATGGCTTCAGACAGCATATTTGAGTCATT | |
| | TCCTTCGTACCCACAGTGCTTCATGAGAGGTGAGTACATGCTGGTCTTG | |
| | TAATATCTACTTTTGCTCAGCTTTGCCTGTAATGAAATGGCAGCTTGTTT | |
| | CACCTCGGTGCAGAGATGCCTCGGTGCCTGCCAGTTCCCTGTCTTGTTT | |
| | GTGAGAGGAATTCAAACTGAGGCATATGATTACAAGTCTATTGGATTAC | |
| | TTACTAATCAGATGGAAGCTCTTCAGAAATGTTTTAATAAATACTTAGTT | |
| | ATGCTGTTGGAGTGTTCAGTCGGTGCGTGAGAACTTTGTCAAGTGCGA | |
| | GTAAGTTGTGCTGG (SEQ ID NO: 952) | |
| SCN1A | AGTCCAAGGAATGCAGTAGGCAATTAGCAGCAAAATATGCCTGATAAA | 597 |
| | AAACACTCACTTTCTTATTGATATAGTAGGGGTCCAGGTCCTCCAGGGG | |
| | CTCTGACACCATCTCTGGAGGAATGTCTCCATAAATAAATGGAAGGTTC | |
| | TTTCCAGCTTCCAAGTCACTATTTGGCTTTGGGCCATTTTCGTCGTCATCT | |
| | TTTTTGTCTGGTTTGGGATTCTTTGCCTTTTCTTCTGCAATGCGTCTTTCA | |
| | ATAGCCGCAAGAGATTCTCTGGTGAAGAAGTTGAAGCTGTCAGGTCCT | |
| | GGTGGTACAAGCACTGTTTGCTCCATCTTGTCATCCTGCACATTTTAATT | |
| | ACCATTTATTCTGCATATGAAATTCCTAAAATAAAAGGAATACAGATATT | |
| | TTAAAGAGTGGACTAAGAGATGTTAATATAAATAAATTCTTGTCATGAA | |
| | ACATGAGCTAGAGGATTTAAAGTCTGTTTTCTCCTTAAATTGAAAGGTG | |
| | ATTTCTAAAGAAAAAATTTTAACACAAATGGTTTCTGTGTTGAGTTTAGT | |
| | TAAGCATCACTTATTTATTAATTCTTGTGCTTTACTGATACAGGAACTGT | |
| | GCC (SEQ ID NO: 953) | |
| FANCF | GCCCTACATCTGCTCTCCCTCCACTAAGAAGAACCTCTTTGTGTGGCGAA | 591 |
| (amplicon 1) | AGTAAAAGTATTAGGGCTTTTAAGTTGCCCAGAGTCAAGGAACACGGA | |
| | TAAAGACGCTGGGAGATTGACATGCATTTCGACCAATAGCATTGCAGA | |
| | GAGGCGTATCATTTCGCGGATGTTCCAATCAGTACGCAGAGAGTCGCC | |
| | GTCTCCAAGGTGAAAGCGGAAGTAGGGCCTTCGCGCACCTCATGGAAT | |
| | CCCTTCTGCAGCACCTGGATCGCTTTTCCGAGCTTCTGGCGGTCTCAAGC | |
| | ACTACCTACGTCAGCACCTGGGACCCCGCCACCGTGCGCCGGGCCTTGC | |
| | AGTGGGCGCGCTACCTGCGCCACATCCATCGGCGCTTTGGTCGGCATG | |
| | GCCCCATTCGCACGGCTCTGGAGCGGCGGCTGCACAACCAGTGGAGGC | |
| | AAGAGGGCGGCTTTGGGGGGGGTCCAGTTCCGGGATTAGCGAACTTCC | |
| | AGGCCCTCGGTCACTGTGACGTCCTGCTCTCTCTGCGCCTGCTGGAGAA | |
| | CCGGGCCCTCGGGGATGCAGCTCGTTACCACCTGGTGCAGCAACTCTTT | |
| | CCCGGCCC (SEQ ID NO: 954) | |
| FANCF | GCGACATAGGACCTTCTCCTCCCTACTCTCTTGTCACGGTTTTTATTTAAT | 575 |
| (amplicon 2) | CAAACATTTATTATTGTTCGATGCTCTTAAATGCCATTTCCTTCAGCTGAT | |
| | TATTTGTATGACAGAAGAGTCAATTAAGCTATTTTGTCCTAAAAATTACG | |
| | AAAACGAAATGTACAATTGTGAAGTAAAATTTTGTTCCTTTGCAAATTTT | |
| | AATAAATTATTGAAGTTTATTTTTTGTTTCAAATAATCTGGGCTTCAGTTC | |
| | TAATAATGGAAGGACAATGTGAAGGCCCAGAATTCAGCATAGCGCCTG | |
| | GCATTAATAGGAGGTCAGTACATTTTTAGTACATGTTTCTCAAATAGATC | |
| | TTAAAATTTCATTTAAGAGCGTTTCCTCACGTCACAGTATGTCTCTGGCG | |
| | TTACTTAATTTTGAAAAACCTCAACACAGATTCTAGTTTTAGGCAAAGCT | |
| | CAGAAAATTTCTACTTAAGGATATTTCCAAAGCGAAAGGAAGCGCGGA | |
| | GACGTTCATGACTGGCATCATCTCGCACGTGGTTCCGGAAATTCTCGGT | |
| | AGGATGCCCTACATCTGCTCTCCCTCC (SEQ ID NO: 955) | |

The application's sequence listing, which the Patent Office published only in electronic form, follows.

SEQUENCE LISTING (714 sequences)

SEQ ID NO: 1 - protein, 1385 aa, unidentified
MEELMTNFSDFTGLFSLSKTLRFELKPVGKTKETFKQWLENMNSTNEEGNLLAKDKKIKDAYLALKPVMNSLHEQFIEMSLLSGKAKEIDFSKYYEAYKEKNVSSKLEEELRAKIGETYEIAGNYFYKEISNVLGKEIKPKKDKPYECLTDAKMLKYLSAKVQELAEQNGVDEQTLKGHLEQFKGFWGYLDGYNQNRENYYEYEKEASTAVATRIVHENLPTFCSNVLRFENRKDEYLGIYQYLKDKNRETKIKNSKGEEVDAKAISESVFQIKHFNECLTQPQIEEYNRIIGNYNLLINLYNQARREEAGFKKIDEFETLYKQIGCGKKKSMFETLQNDSDVKDLLQNAKNAGDVMFKNTLPAFIRFLKECDNWDGIYMSSAAVNKISNQYFANWHSIKDKLKDAKANACITYDKNREEQIKLRDAVELSGLFAVLDTEHSEHFFKDSLFKDNETNEYRGILDKDLPPSKNLINLLCFDIERNIKAFLQESDRIAALEKYKDENIQAGEEDQTIKKIKEWFDAATDAMRIVRYFAVRKSKMKGNLPNVTMEQALSNLLYNDDVQWFKWYDLVRNYFTKKPQDDAKENKLKLNFGKGTLLNGFVDSHSDSDNGTQYGGYIFRKKHEKCNEYEYFLGVSKNAQLFRCHLKNEVPSNDKSAFERLEYYQMKSTTPYPNDYGNKKEEIIDVVRKLAEDNEELVEWIDKKNEDKKLTPTELFKRLENTNDPILKNKELLNKVDETISIIKSNLKNFTRINAINDLQNDDQNHGGIDGFKKLVDELKKITAATKLFDFFPVSSSEFNAHNGEDLFLFKISNKDLSYCETFAEGKRKEKTNQKENLHTLIFRALMREDLFGDIVDIGKGEVFLREKVREYDYDDSVRKYGHHYNDLKDRFTYPIISNKRFSEDKILLHLSVILNYKSDNKKNVGVEINDALQQSDNLQFIGIDRGEKHLVYSCTIDKNAKIIKCNHHDNINGTDYVKKLEDVADERIIAKKNWQAQNKIKDLKTGYISHVVHRLVEETIKDGEKIAPHAYIVLEDLNTEMKRGRQKIEKQIYQNLETALAKKLNFVVDKDAKEGELGSVSKALQLTPPISNYQDIEGKKQFGVMLYTRANYTSVTDPATGWRKTIYIKNGKEEDIMNQIFKEFSDFGFDGKDYYFEYTEANAGHTWRLYSGKDGKPLPRFQNKKQIQQDKNIWVPEQINVVKILDEIFADFDKAKSFKTQIEEGIELKKAGGRTETAWQSLRYALELIQQIRNSGEKDSKDDNFLYSPVRNENGEHFDTRHPEKNGDLSKIVDADANGAYNIARKGLIMDAHIKHWIESGRPKTKKDGKEKSDLDLFISDKEWDLWLLDREQWKKDLPAFASLSAKDDADKSKAGRGRKKQ

SEQ ID NO: 2 - protein, 1362 aa, unidentified
MEQFTNLFQLSKTLKFELKPIGKTEETFKQWLEEIQKSELDVYNDSNLFLKDKKIKDAYLAIKPIMDKLHEQFIEESLTSDLAKNIDFSEYYEAFRNKTVKDEMETKLRKVFAETYQYAGKLFIDMISKAQKNGKEIKTKKEKPYECLTDSKILNFLSANVKELAKLTDANEQELTNHIKQFRGFWGYLDGFNTNRENYYVTEKEQSTAVATRIVHENLPTFCSNALRFEKRREEYLGIYQYLKDNNRETKIKNSQGEEIEAESIDVSYFEIEHFNECLAQSQIDEYNRVISHYNLLINLYNQARREESQFKKIDEFEILYKQIGCGKKQSMFEILQSDNDVRNLLQKVRRAGDIMFKKGHSEGEIDNVYDFIQFLKECDNWEGIYMSNAAINKISNLYFANWHSIKDKLKESKANACITYDKKREEPIKLRDAVELSGLFEVLDQEQPEHILKESLFKDEATNEYRGVLKKELSPSKNIIMLLCYDIERNTKAFLDSSDSIVAIEKFKDKKQFVGEEDQTIKQVKDWLDAATDAMRIVRYFAVRKSKMKGNLPNVTMEQALSNLLHNEDAQWFKWYDLIRNYLTKKPQDDAKENKLKLNFGTSSLLGGWSDGQEKTKAATLLRNNNALYLCILKTKNVFDTSKDNNPIYNVSQSNASRLILRNLKFQTLAGKGFLGEYGISYGEMGKNDSTKAISCLQKIIKTRYVDKYPLLEKFVTNTYTDKREFDAEILETLKECYVCEFKPIDWTFVIEKQNAGELFLFKISSKDYLPNAKGRKDLQTMYWEDVLSDGSKHQLCAGAEIFMREPVAKESPVMHRIGSKLVNRRDKDGNTIPEHIYREIYSYVNGKMSVVSAKAQKYIDDKRVIVKDVKHEIVKDKRFYGETKYMFHCPIKLYFEAKDPKYAFSEVNKTITDSLQQSPNLQFIGIDRGEKHLVYSCTVDTNCKIIRCNHHDFINGTDYVQKLDAVANDRIIAKKNWQAQSKIKDLKSGYISHVVHRLVDETIKDGNVIAPHAYIVLEDLNTEMKRGRQKIEKQVYQNLEVALAKKLNFVVDKNAKHGELGSVSMALQLTPPINNYQDIEGKKQFGVMLYTRANYTSVTDPATGWRKTIYIKNGKEEDIRKQILEAFRDFGFDGRDYYFEYTEANVGHTWRMYSGNNGKPLPRFRNRKQIFQDKNVWVSEQINVVEILDRLFVKFDKKKSFKEQIEQGKELEKVEWRDESAWQSFRFALDLIQQIRNSGTEDNDDNFLYAPVRNDHGEHFDTRNHKNNGELSEIRDADANGAYNIARKGLIMDAHIKRWIEIGCPTVSEDKAPDLDLFISDLEWDLWLLDRERWEKELPIFASRSAKKKEDKQQTRGKKQ

SEQ ID NO: 3 - protein, 1366 aa, unidentified
MKEFTNLYQLSKTLRFELKPIGKTAKTFQRWLEEMNKAELVGDNDGNLFLKDKKIKNAYLAIKPIMDKLHEQLIEMALLSKEAKQIDFSEYFEAYKNKAVRVEMENGLRKAFAKPFQYAGLYFVEEISKSQKNGKEIKTKKDKQYECLTDAKMYNYLSAHVRDLAEQNGIDEQKLKKHIEQFKGFWGYLDGYNQNRENYYEVDKEASTAVATRIVHENLPTFCSNAMRFEKRKDEYLCIHRYLKDNSRETKIKNTKGEEIDVEAISDNIFQIKHFNECLAQSQIEEYNRIIGNYNMLINLYNQLRRGEKDFKKIDEFEKLKKQIGCGKKKSMFETLQGDSDVKKLLLKASEAGKQMFKDVADFSEIKTVPDFIEFLRECDNWDGIYMSKTAIDKISSLYFANWHSIKDKLKEAKADACITYEKKREEPIKLRDAVELSGLFAVLDSEQSEHFFKDSLFKDDDTNDYRGVLNKTLTPSKNLIQLLCFDIERNTNAFLSKSNNIVKLEKYKDENDQAGEEDQTIRKIKEWFDAATDAMRIVRYFSVRKSKMKGNIPNATIEQALSNLLYNDDAQWFKWYDLIRNYLTKKPQDDAKENKLKLNFGTSSLLGGWSDGQEKTKVATLLKYHDEIYLCVLKTKNIFDTSKDNNPIYDITESEASRLLLRNLKFQTLAGKGFLGEYEISYGDMGKENPTKAIKCLQKIIKERYVNKYPLLEKFARNTYTDKAQFDAEITETLKECYVCQFVPIDWNVVTEKQDNEELFLFKILCKDYRPKSVGKKDLQTMYWEDVLSDGSKHQLCAGAEIFMREPVAKESPIIHRIGSKFVNKRDKDGDTIPEQIYREIYSYANGKKKTISAESRKYIDEQKVIIKDVKHKIIKDNRFYGETKYMFHCPIKLQFEAKDPKYAYSEVNTTVSNALQQSDNLQFIGIDRGEKHLVYSCIVDKDCKILKCGHHDVINGTDYVQKLEAVADERIVAKKNWQQQNKIRDLKNGYISHVVHRLVEETIKDNGKIAPHAYIVLEDLNTEMKRGRQKIEKQVYQNLETALAKKLNFVVDKDTKKGEIGSVSKALQLTPPINNYQDIEGKKQFGVMLYTRANYTSVTDPATGWRKTIYIKNGKEDDIKNQILDKFSDFGFDGDYYFEYTEANVGHTWRLYSGKNGKALPRFQNKKQALQDKNVWVPEKINVVDILNKLFAKFDKKKSFKSQIEAGVELQKDEERNETAWQSLRFALDLIQQIRNSGEKNSGDDNFLYSPVRNDKDEHFDTRNYKNNGELSEIRDADANGAYNIARKGLIMDTHIKHWINNGRPKTKIDGSEVSDLDLFISDREWDLWLLDREQWMKELPTFASKIAKYDSDAPQTAKRRKKR

SEQ ID NO: 4 - DNA, 4158 bp, unidentified
  source 1..4158: mol_type = other DNA
atggaggaactcatgacgaatttttctgatttcacaggcctcttttctctgtctaagaccctgagattcgaattaaagccagtcgggaaaactaaggagacttttaagcagtggttggagaacatgaactctacaaacgaggagggcaacctgctggccaaagacaagaaaattaaggatgcgtacctggccctgaaaccagttatgaatagcttgcacgaacagtttattgagatgagtctactgtccggcaaggcaaaggagattgacttcagtaaatactacgaggcctacaaggagaaaaatgtgagcagcaaactcgaagaagagttgcgtgccaaaattggagaaacatacgaaatcgcagggaactacttctacaaagagatctccaatgttcttggcaaggaaatcaaacctaagaaagacaagccctatgagtgcctcactgatgctaaaatgctgaaatatttgtcagcgaaggtgcaagaattagcagagcagaacggtgtggacgaacaaacacttaagggacatctggagcaatttaaggggttttgggggtacctggacgggtacaaccagaatagagaaaactactacgagtacgagaaagaggcttccactgcagtggccacccgaatcgtgcatgaaaatctgcccacattttgtagtaacgttctgcgcttcgaaaaccgaaaagacgagtatctaggcatatatcagtacttgaaggacaagaatcgggaaaccaagattaaaaactcaaagggggaagaagttgacgctaaggcaatatcggagtcagtctttcagattaagcacttcaacgaatgtttaacccaaccccaaatcgaagagtataacagaatcatcggcaactacaatctcctgatcaacctgtataaccaggcccgtagggaagaggccggtttcaagaaaatcgacgagttcgagacattgtataaacagatcggctgtggcaaaaaaaaatcaatgttcgagacacttcagaacgacagtgacgtgaaagacttgctgcagaatgccaagaatgctggtgacgttatgtttaaaaatacacttccggccttcatcagattcttgaaggagtgtgataattgggatggcatatacatgagctccgccgccgtgaataagatcagcaaccagtattttgcaaactggcacagtatcaaggataagttgaaggatgctaaagccaatgcctgtatcacctacgataaaaacagggaagaacaaatcaaactgcgggatgctgtagagctatctgggctgttcgctgtgttggacaccgaacactccgaacacttctttaaggactcactgttcaaagacaatgagacgaacgagtataggggcattctcgacaaagacttgccacctagcaaaaatctgatcaaccttctatgcttcgatattgagaggaatataaaagccttcctccaggaatcagatcggatcgctgctttggagaagtacaaagacgagaatatccaggctggagaggaggatcagaccatcaaaaaaatcaaggaatggttcgatgcagcgacagacgccatgaggattgtacgctattttgccgtccggaaatcaaaaatgaagggtaacctgccaaatgtgaccatggagcaggctctgagcaacttactgtacaacgatgatgtgcagtggttcaagtggtacgacttggtcaggaattattttacaaagaagcctcaggacgatgccaaagagaataagcttaaactcaattttggcaagggtaccctattaaatggcttcgtggattcccatagcgatagtgataatggaactcagtacgggggttacatattccgtaaaaaacacgagaaatgcaacgaatacgaatatttcttaggggtatccaagaacgcgcaactcttcagatgccatctgaagaacgaggtccctagcaatgacaaatcagccttcgagcgccttgaatactatcagatgaaatccactacaccctatccaaatgattacgggaataaaaaggaagagatcattgacgtggttagaaaactggccgaggataatgaggaactggtggaatggatcgacaaaaagaatgaggacaaaaagcttactcccactgagctcttcaagcggcttgagaacaccaacgacccaattctgaagaataaggaactgctcaacaaggtggacgaaaccatatccatcatcaagtctaatctcaagaattttacccggatcaacgctattaacgatttacagaatgacgaccagaatcacggtggtattgatggttttaaaaagctcgtcgacgaactaaagaagattactgcagccaccaagcttttcgattttttccctgtgtcgtctagtgaatttaatgcgcacaatggggaagacctgtttctcttcaagatttcaaacaaggatctcagctactgtgaaacatttgcggagggcaagcgcaaagaaaaaaccaatcaaaaggagaacctccataccctgatcttcagagcgctgatgagagaggacctgtttggagatattgtcgacatcggaaagggcgaggtttttctccgagagaaggtgcgggagtacgactatgacgatagcgtgcgcaaatatgggcatcattacaacgacctgaaggataggtttacataccccattatttcaaacaaacgattctctgaggataagattctcctacacctgtctgtcattttgaactacaagtccgataacaagaaaaacgtgggggtcgaaataaacgacgccctgcagcaatccgacaatttgcaattcattggaattgaccgcggggagaagcacctggtttatagctgcaccatcgataagaatgccaaaatcataaagtgcaaccatcacgataacatcaacggaacagactatgtcaagaaactggaggacgtggctgacgaacgaattattgccaaaaagaattggcaagctcaaaacaagattaaggacctgaagaccggatacattagccacgtagtacatcgcctggtggaagagacgatcaaagatggagaaaaaatagctcctcacgcatatatagtgcttgaggatctcaacacagagatgaaaaggggccggcagaagatcgagaaacagatttaccaaaatctggaaactgctcttgcaaaaaagctcaatttcgtagttgataaggatgccaaggaaggcgagctcggcagcgtgtccaaagcccttcagcttactccccctataagcaattatcaggatatcgagggaaagaaacagttcggagtgatgctatatacccgggcaaactacacctcggtcactgacccggctactggctggaggaagaccatctatattaagaatggcaaagaggaggacatcatgaaccagatcttcaaagagttttccgattttggctttgacggaaaggattactattttgagtatacggaagcaaacgccggtcacacgtggagactttacagcggcaaggacggcaagcccttaccccgctttcagaacaagaagcagatacagcaggacaagaacatttgggtcccggaacagatcaatgttgtgaagattctcgacgagatattcgccgacttcgataaggctaagtcgttcaaaacccagatcgaagaggggattgaactgaagaaggcaggagggagaactgaaacggcttggcagtccctgcgatatgcgctggagctgatacagcagatccgcaattctggagaaaaagacagtaaggatgataactttctctattcaccagtccgtaatgagaacggtgaacactttgacacaagacatccagagaagaacggggatctctctaaaattgtggatgcagatgccaatggggcctataacatcgcacgcaagggactgattatggacgctcatatcaaacactggatcgaatctggcaggcctaagactaagaaagatggaaaggagaaaagtgatctggacttgttcataagcgacaaggagtgggacctgtggttacttgatcgggagcagtggaagaaggacctgcctgcctttgcttccctgtctgcaaaagacgatgcagataaaagtaaagccggcaggggacggaaaaagcaatga

SEQ ID NO: 5-6 - skipped (2 entries)

SEQ ID NO: 7 - DNA, 34 bp, unidentified
  source 1..34: mol_type = other DNA
ctgctaaaccgctaaaatttctactattgtagat

SEQ ID NO: 8 - DNA, 36 bp, unidentified
  source 1..36: mol_type = other DNA
ggctgctaaaccgctaaaatttctactattgtagat

SEQ ID NO: 9 - DNA, 36 bp, unidentified
  source 1..36: mol_type = other DNA
atctacgatagtagaaattataatggctttatagcc

SEQ ID NO: 10 - DNA, 23 bp, unidentified
  source 1..23: mol_type = other DNA
atctacgatagtagaaattataa

SEQ ID NO: 11 - DNA, 36 bp, unidentified
  source 1..36: mol_type = other DNA
gtctataggactcaaataatttctactattgtagat

SEQ ID NO: 12 - DNA, 36 bp, unidentified; identical to SEQ ID NO: 11
  source 1..36: mol_type = other DNA

SEQ ID NO: 13 - RNA, 35 nt, unidentified
  source 1..35: mol_type = other RNA
ggctgctaaaccgctaaaatttctactatgtagat

SEQ ID NO: 14 - RNA, 36 nt, unidentified
  source 1..36: mol_type = other RNA
ggctataaagccattataatttctactatcgtagat

SEQ ID NO: 15 - RNA, 36 nt, unidentified
  source 1..36: mol_type = other RNA
gtctataggactcaaataatttctactattgtagat

SEQ ID NO: 16 - protein, 1414 aa, unidentified
MEELMTNMXXFTNLFQLSKTLRFELKPIGKTXETFKQWLEEMNKXELXXXNDGNLFLKDKKIKDAYLAIKPIMDKLHEQFIEMSLLSXXAKXIDFSEYYEAYKNKXVXXEMEXXLRKXFAETYQYAGXYFXXEISKXQKNGKEIKTKKDKPYECLTDAKMLNYLSAXVXELAEQNGXDEQXLKXHIEQFKGFWGYLDGYNQNRENYYEXEKEASTAVATRIVHENLPTFCSNALRFEKRKDEYLGIYQYLKDNNRETKIKNSKGEEIDAEAISXSXFQIKHFNECLAQSQIEEYNRIIGNYNLLINLYNQARREEXXFKKIDEFEXLYKQIGCGKKKSMFETLQXDSDVKXLLQKAXXAGDXMFKXXXXXXEIXTVPDFIXFLKECDNWDGIYMSXAAINKISNLYFANWHSIKDKLKEAKANACITYDKKREEPIKLRDAVELSGLFAVLDXEQSEHFFKDSLFKDXXTNEYRGVLXKXLXPSKNLIXLLCFDIERNTKAFLXXSDXIVALEKYKDENXQAGEEDQTIKKIKEWFDAATDAMRIVRYFAVRKSKMKGNLPNVTMEQALSNLLYNDDAQWFKWYDLIRNYLTKKPQDDAKENKLKLNFGTSSLLGGWSDGQEKTKXATZZZZZLLRZZZZZZNXXEXYLCVLKTKNXFDTSKDNNPIYXXXXSNASRLXLRNLKFQTLAGKGFLGEYGISYGEMGKZZZZZZEDXTKAIXCLQKIIKXRYVXKYPLLEKFZZXXNTYTDKXEFDAEIXETLKZZECYVCXFXPIDWZZXXVXEKQNXGELFLFKILXKDYXPXXXGXKDLQTMYWEDVLSDGSKHQLCAGAEIFMREPVAKESPXXHRIGSKXVNXRDKDGXTIPEXIYRZZZZZZZZZZZZZZZZZEIYSYXNGKXXXXSAXXRKYIDXXXVIXKDVKHXIIKDKRFYGETKYMFHCPIKLXFEAKDPKYAXSEVNXTIXDALQQSDNLQFIGIDRGEKHLVYSCTVDKNCKIIKCNHHDXINGTDYVQKLEAVADERIIAKKNWQAQNKIKDLKXGYISHVVHRLVEETIKDGXKIAPHAYIVLEDLNTEMKRGRQKIEKQVYQNLETALAKKLNFVVDKDAKXGELGSVSKALQLTPPINNYQDIEGKKQFGVMLYTRANYTSVTDPATGWRKTIYIKNGKEEDIXNQILXXFSDFGFDGXDYYFEYTEANVGHTWRLYSGKNGKPLPRFQNKKQIXQDKNVWVPEQINVVXILDXLFAKFDKKKSFKXQIEXGXELXKXEXRXETAWQSLRFALDLIQQIRNSGEKDSXDDNFLYSPVRNDXGEHFDTRNXKNNGELSEIRDADANGAYNIARKGLIMDAHIKHWIEXGRPKTKXDGXEXSDLDLFISDXEWDLWLLDREQWXKELPXFASXSAKXDXDKXQTXXRRKKQ

SEQ ID NO: 17 - DNA, 4158 bp, unidentified
  source 1..4158: mol_type = other DNA
atggaggagttgatgacaaatttttctgatttcacggggcttttttcgcttagcaagactctcaggtttgaacttaaacctgttgggaaaactaaagaaacctttaagcaatggcttgaaaatatgaatagcaccaatgaggaaggcaacttgttggcaaaggataagaaaatcaaagatgcctatttagcattaaagccagtaatgaatagtctgcatgagcagtttattgaaatgtctttgctctctggtaaagcgaaggaaatcgatttctcgaaatactatgaagcatacaaagaaaaaaacgtttcaagcaagcttgaggaagaattacgcgcaaaaattggtgaaacctatgagattgctgggaattatttttataaagaaataagcaatgttcttggcaaagaaatcaaaccaaagaaagataagccatacgaatgccttactgatgctaaaatgctcaagtacttatcagccaaagtacaggaattggctgaacaaaacggcgtagacgaacaaacccttaaaggtcatcttgaacaattcaaaggattttggggatatttggacggatataaccagaatcgtgagaattattatgaatatgagaaagaggcttcaaccgctgttgctacacgtattgtccacgaaaatctacccacattttgcagcaatgttttgcgttttgagaatcgcaaggacgagtatctcggcatttaccagtatttgaaagataagaaccgcgaaacaaagattaaaaattcaaaaggcgaagaagttgacgcaaaagcaatttctgaaagtgtttttcaaatcaagcattttaacgaatgccttacgcagccgcaaattgaagagtacaaccgaattattggcaattacaatttgctaatcaacctatacaatcaggcacgacgagaggaagcaggtttcaagaagatagacgagtttgaaaccttatacaaacaaattggttgcggtaaaaagaaatcgatgtttgaaacgttgcaaaacgacagtgatgtaaaagatcttctgcaaaatgctaaaaatgcaggcgatgtaatgtttaaaaataccctgccggcatttatccggtttttgaaagagtgcgataactgggacggcatttatatgtcaagtgccgccgtcaataaaatatcaaaccagtactttgctaattggcacagtatcaaggataaattaaaagacgcaaaagcaaacgcatgcatcacatacgataaaaacagggaagagcaaataaaactgcgtgatgctgtggaattgtcgggattgttcgctgtgttggatacagaacattcggaacactttttcaaagactcgcttttcaaggataacgaaaccaacgagtatcgtggcattttggataaagatcttccgccaagcaaaaatctcatcaatttgttgtgctttgatattgagcgcaacataaaggcatttctgcaagaatctgataggattgccgcattggaaaaatacaaagacgaaaacattcaggcaggtgaagaagaccagacgataaagaaaataaaagagtggtttgatgcagcaaccgatgctatgcgtattgtgcgctattttgctgtgcgtaaaagcaagatgaaaggcaacttgccaaatgtgacgatggaacaggcattgagcaacttgctatacaacgatgatgtccagtggttcaagtggtatgaccttgttcgcaactattttaccaagaaacctcaagacgatgcaaaagaaaataaattgaagttgaattttggaaaaggaacattgttaaatggatttgttgattctcatagtgattcggataatggtacgcaatatggtggctatatttttagaaagaaacatgaaaagtgcaatgaatatgaatatttcttgggtgtcagtaaaaatgcgcaactgtttagatgtcatttgaaaaatgaagttccttccaatgataaaagtgcttttgagcgtttggagtattaccaaatgaaatcaacgacaccgtatccaaatgactatggtaacaaaaaagaggaaattatagatgttgtgagaaaattagccgaagataatgaagaattggtagagtggattgataagaaaaatgaagacaagaaattaacaccaacagagttgtttaagagattggagaatacaaatgatcctatattgaaaaataaagaactattaaacaaggtagatgagaccatttctataatcaaatctaatctcaaaaactttacacgtattaatgcgattaatgaccttcaaaacgatgaccagaaccatggtggcatagacggttttaagaagctggtagatgaattaaagaaaattactgcagcaactaaactgtttgatttctttcctgtcagctcaagtgagtttaatgctcacaatggagaagatttgtttttgtttaaaatatcaaacaaagatttgtcatactgcgaaacatttgcagaaggaaaaagaaaagaaaaaacaaatcaaaaagaaaatctacatacattaatttttagagctttgatgcgtgaagatttatttggtgatattgtcgatattgggaaaggagaagtctttttacgtgaaaaggtcagagaatatgattacgatgatagtgtacgaaagtatggacatcactacaatgatttaaaggacagatttacttatcccattatttcaaacaagcgtttttcagaagataaaattcttttacatttgtcagtaatattgaattataagtctgataataagaaaaacgtaggagtagaaattaacgacgctctccaacaatccgacaacctacaatttatcggcattgatcgtggcgaaaagcaccttgtgtatagctgcacgatagataagaatgctaagatcataaaatgcaaccaccacgataatatcaatggaactgactatgtgaaaaagttagaggatgttgccgacgagcgtattattgccaaaaagaattggcaggcacagaacaaaatcaaggatttgaagaccggctatatatcacatgttgtgcatcgtttggtggaagaaaccatcaaagacggcgagaaaattgccccgcacgcttacatcgttttggaagatttaaacaccgagatgaagcgcggtcgccaaaagattgaaaagcagatttatcaaaacctggaaacagcgctcgcaaagaaactcaattttgttgtggataaagacgctaaggagggcgaacttggctctgtgagcaaggctttgcaacttacgccgccaatcagcaactatcaagatattgagggcaagaaacaattcggtgtaatgctttatacgagagcaaattatacttctgttactgatccggcaacaggatggcgcaaaaccatttatataaaaaatggcaaggaagaagacattatgaaccagatatttaaggaattcagtgattttggttttgacggaaaagactattactttgaatacaccgaagccaatgcagggcacacttggcgtttgtattccggcaaagatggcaaaccgctacctcgtttccaaaacaagaagcaaatacagcaggacaagaatatttgggtgcctgagcaaataaatgtggtaaaaatccttgatgaaatttttgctgattttgataaagcgaagtcgtttaaaacacagattgaagaaggtattgaattaaaaaaggctggtggacgaaccgaaacggcttggcaatcgcttcgatatgcgcttgaattgattcagcaaatccgcaattcaggtgaaaaggattccaaagacgacaacttcttatattcccccgtccgcaacgaaaacggtgaacactttgacacgcgccatccagaaaagaatggcgacttgtccaaaatcgtagatgccgatgccaatggcgcatacaacatcgctcgcaaaggcttgattatggatgcgcacatcaagcattggattgaaagcggacggccaaaaacgaaaaaagacggaaaagaaaaatctgatttagatttgtttatttctgataaagagtgggatttgtggcttttggatagagagcaatggaaaaaagatttgcctgcatttgcctctctaagcgcaaaggatgatgctgataaatccaaagcaggaagaggaagaaaaaaacaataa

SEQ ID NO: 18 - DNA, 4089 bp, unidentified
  source 1..4089: mol_type = other DNA
atggaacaatttacaaatctttttcagttatcaaaaacattgaagtttgaattgaaacccattggtaaaacggaagaaacttttaaacagtggctggaggaaattcaaaaatctgaattagatgtttataatgatagcaacttgtttctgaaagataagaaaatcaaagatgcctatttggctattaagccgattatggacaagttgcatgaacagtttattgaagagtctttgacgtctgatttggccaaaaatatcgatttctcggaatactatgaagcttttagaaataagactgtaaaggatgagatggaaacgaaattgcggaaggtttttgccgagacctaccaatatgcaggcaaactttttatagatatgatttctaaagcccaaaaaaacggcaaagaaatcaagactaaaaaggaaaaaccatacgagtgccttaccgattctaaaatacttaactttttatctgcaaacgtaaaggaattggcaaaacttacagatgctaatgagcaagaactgactaatcatataaagcagttccgtggtttttggggatatttagatggtttcaatacaaacagggaaaactattatgtaacagagaaagagcagtctacagctgttgccactcgtattgtccatgaaaacttgcccacattctgcagcaatgctttacgttttgaaaagcgcagggaagagtatctcggtatttatcagtatctaaaagataataaccgcgagaccaaaattaagaactcgcagggcgaagagatagaagcggagtccattgacgtaagttatttcgaaatagagcattttaatgaatgccttgcacagtctcaaatagatgagtataatcgtgtcatcagccattataacctattgattaatctttacaatcaggcacgtcgcgaagaatcgcaatttaaaaagattgacgaattcgaaatcctctataagcaaattggttgtggcaaaaagcaatcaatgtttgaaatcttacaaagtgacaatgatgtgagaaatttattacaaaaagtaagacgtgctggtgatataatgtttaaaaaaggccatagtgaaggcgaaatagataatgtctacgattttatccaattcttgaaagaatgtgataattgggaaggaatctatatgtcaaatgctgctattaataagatttcaaatttatactttgccaattggcacagcataaaagacaaattaaaggagtcaaaggcaaatgcatgtattacatacgacaaaaaacgtgaagagccaatcaaattacgtgatgccgtggagttgtctggcttgtttgaagtgctggatcaggaacagccagaacacattctcaaagaatcgcttttcaaagatgaggccactaatgagtatcgtggtgttttgaaaaaggaactttctccgagtaagaatatcataatgctattgtgctatgatattgaacgtaatacaaaggcttttttggattcttcagatagcattgttgcaatagaaaagtttaaagacaagaaacagtttgtaggagaagaagaccaaacgataaaacaagtaaaagattggcttgatgcggcaacagacgctatgcgtatagttcgttattttgctgtgcgtaaaagtaaaatgaaggggaacttaccaaatgtaacgatggaacaagcgttgagcaaccttctacataatgaagatgcacaatggtttaaatggtatgaccttatccgtaactatcttaccaagaagccgcaagatgatgcaaaagagaacaaactaaagcttaattttggcacttcttctttacttggcggctggagtgacggacaggagaaaacaaaagctgctactttattgaggaataataatgccttatatctatgtatattaaaaacgaaaaacgtttttgacacgtcaaaggataataatcccatttataatgtttcacaatcaaatgcaagtcgcttgattttaagaaatctcaaatttcagacacttgcagggaaaggctttttaggtgagtatggtatttcttatggagagatggggaaaaatgattctaccaaagcaattagttgtttacaaaaaatcataaaaacgcgatatgtggataaatatcctttactggagaaatttgtaacaaacacatatacagataagcgtgaattcgatgctgagattctcgagacattgaaagaatgttatgtctgcgagttcaaaccaatagattggacttttgtcattgaaaaacaaaatgccggtgagttgtttttgtttaaaatatctagtaaagattacttaccaaacgctaagggtagaaaagatttgcagacaatgtattgggaagatgtgttgtctgatggtagtaaacatcaattgtgcgcaggtgccgaaatctttatgcgcgagccagtcgccaaagagtcaccagtgatgcatagaataggatcaaaactcgtaaacaggagagacaaagacggaaacactattccagagcatatatatagagaaatttattcttatgttaatggcaaaatgagtgtcgtttcagctaaagcccaaaagtatatagatgacaaaagagtgattgtcaaggatgtaaagcatgaaattgtcaaagacaagcgcttttatggtgaaacgaaatatatgttccattgtccaattaagttgtattttgaggcaaaagatcccaaatatgcattctcggaagttaataaaacaataacagattcgcttcaacagtcccccaatttgcaatttataggcatagatcgtggcgaaaagcaccttgtatatagttgtacggttgatacgaattgtaaaatcatcagatgtaaccatcatgattttatcaatgggaccgactatgtgcagaaattggatgcagttgctaatgatcgcatcattgctaaaaagaattggcaagcccagagtaaaattaaggatttgaaaagtggttatatatcgcatgtggtacatcgtttagtggatgaaaccataaaagacggtaacgtaattgccccacacgcgtatattgtcttggaagacctgaacacggaaatgaagcgaggccgccaaaagatagaaaagcaagtctaccaaaatttggaagttgcccttgccaagaaattaaattttgtagtagataaaaacgccaagcatggagaactaggttcagtgagcatggcattgcagcttacgccgccaatcaacaactaccaagatattgagggtaaaaaacaatttggagtaatgctttacacacgagccaattacacatcggtgaccgatcctgcaacaggatggcgtaaaaccatctatataaagaatggaaaagaagaagatataagaaaacaaattctcgaagcatttcgcgactttggctttgacggcagggattattactttgaatatactgaagccaatgtggggcacacttggcgtatgtattctggcaataatggtaaacctctacctcgcttccggaacagaaaacagatattccaggacaagaatgtatgggtatcagagcaaattaatgtagtggagatcctcgacaggctgtttgtcaaattcgataaaaagaaatctttcaaggagcagatagaacagggcaaagaacttgaaaaggtagaatggcgagacgagtccgcttggcaatcttttcgatttgcgcttgatttgattcagcaaattcgcaattctggtacggaagacaacgatgataatttcttgtatgctccagtgcgcaacgaccacggcgaacactttgacacacgcaatcataagaataatggcgaattatctgaaatcagagatgctgatgctaatggagcatacaatattgctcgcaaaggattgataatggatgctcatattaagcgttggattgaaatcggctgtcccacagtgagtgaagataaagcgccagatttagatttatttatctcagatttggaatgggatttgtggcttctggatagagaacgttgggaaaaagaactacccatcttcgcatcacggagtgcaaagaagaaagaagataaacagcaaacgagagggaaaaaacaataa

SEQ ID NO: 19 - DNA, 4101 bp, unidentified
  source 1..4101: mol_type = other DNA
atgaaagaatttacgaacctgtatcagttatcaaaaactctgagatttgaactgaagcctattggcaagaccgcaaaaacctttcaaagatggcttgaggaaatgaataaagccgaacttgttggtgataatgatggcaacttatttttgaaggacaagaaaattaagaatgcctatttggctattaaaccaataatggacaaactgcatgagcagcttatagagatggctttgctttctaaagaagcaaaacaaattgatttttcggaatattttgaagcatataagaataaagccgtaagggttgaaatggaaaatggcttgcggaaagcattcgcaaaaccatttcaatatgcaggcctatactttgtcgaagagatttctaaatcccaaaagaatgggaaagagatcaagactaaaaaagataagcaatacgaatgtctcaccgatgcgaagatgtataattatctatcagcacatgtcagggatttagctgaacagaacggtattgatgaacaaaaacttaagaaacatattgaacaattcaaaggcttttgggggtatttggatgggtacaaccaaaatagggagaattattatgaggttgacaaagaggcttcaaccgctgttgccacacgtattgttcatgaaaacttacccactttctgtagcaatgctatgcgttttgaaaagcgcaaggatgaatatctctgtattcatcgatatttgaaagataatagccgtgaaacgaagattaaaaacacgaaaggcgaagagattgatgtagaagcgatttccgataatatttttcaaataaagcattttaacgaatgccttgctcagtcacaaattgaagagtacaaccgcattattggcaattacaatatgctgattaatttatacaatcagttgcgacgtggcgaaaaggattttaagaaaattgacgaatttgaaaaattaaaaaagcaaattggttgcggcaaaaagaaatcaatgtttgagacattgcagggggatagcgatgtgaaaaaacttctgctaaaagcaagtgaagcaggaaaacagatgtttaaggatgtcgctgatttctcagaaattaaaacggtgccagattttattgaattcttgagagaatgcgataattgggatggcatttatatgtcgaaaacagcgattgacaaaatatctagcttgtattttgccaactggcacagcatcaaggataaattaaaagaagctaaagcggatgcctgtatcacatacgaaaagaaacgtgaagaacctataaaattacgtgatgcagtggaattgtctgggttgtttgccgtgttggattctgagcaatctgaacattttttcaaagattcgttattcaaagatgatgataccaacgactatcgtggtgttttgaataaaactcttacgccaagcaagaacctcatccaattgctgtgttttgatattgagagaaatacgaatgcatttctatctaaatctaataacattgttaaattagaaaagtataaggacgaaaacgatcaggctggtgaagaagaccaaacgattaggaaaataaaagaatggtttgatgcggcaaccgatgctatgcgtattgtgcgctatttctccgtgcgcaaaagcaaaatgaaaggtaatattccaaatgccacaatagaacaggcgttgagcaatctgttatacaacgatgatgcacagtggtttaagtggtatgacctcatccgcaattatctaaccaagaaaccgcaagacgatgcaaaagaaaacaagttgaagttgaattttgggacttcgtctttactaggtggttggagtgatggacaagaaaaaacaaaagtcgccaccttattaaagtaccatgatgaaatatatttatgtgtattgaagaccaagaatatttttgatacatcaaaggataataatccgatttatgacataacggaatcagaagcaagtcgcctgttattaagaaacctgaagttccaaactcttgcaggaaaaggctttttgggagaatatgaaatttcatatggcgatatggggaaagaaaatccaaccaaagcaattaagtgtttacagaaaataattaaagaacgatacgtaaacaaatatcccttattggagaaatttgcaagaaatacctatacagacaaagctcaattcgatgcagaaattacagaaacattaaaagaatgttatgtctgtcaatttgttccaatagattggaatgttgttactgaaaaacaagataatgaggaattattcttgttcaaaatactctgcaaggattataggccgaaaagcgttggaaagaaagatctacaaacaatgtattgggaggacgtgttgtcagatggaagcaaacatcaattgtgtgctggtgccgaaatatttatgcgtgaaccagtagcaaaggaatcaccaattatacatagaatcggttctaagtttgtaaacaaacgagacaaagacggcgatactattccagaacagatttatagagaaatatattcgtatgccaatggtaagaagaaaacaatatccgctgaatctagaaagtatattgatgaacaaaaggtgataattaaagatgtgaagcacaaaatcattaaggataatcggttttatggtgaaacaaaatacatgttccattgcccaattaaattgcaatttgaagctaaagatcctaaatacgcttattcggaagtaaacacaaccgtcagcaacgcacttcagcaatctgacaacctacaatttatcggcatagaccgtggtgaaaagcatcttgtttatagttgtatagttgacaaggattgcaagatactaaagtgtggtcatcacgacgttatcaatggaacggactatgttcaaaaattagaggctgttgccgacgaacgcattgttgccaaaaagaattggcaacagcagaacaaaatcagagatctgaaaaacggctatatatcgcatgtggtacatcgcttggtagaggagacaataaaagataacggaaaaatagctccacacgcatacattgttttggaagacctgaatacagaaatgaaacgtggtcgccaaaagattgagaaacaggtttatcaaaacctggaaacagcgcttgcaaaaaaactcaattttgtagtggataaagatactaagaaaggtgaaataggatctgtaagtaaggcattacaacttacgccccctatcaataactaccaagacattgaaggtaagaaacaatttggcgtaatgctatatactcgagccaattatacgtcagtcaccgaccccgcaacaggttggcgcaaaaccatctacattaagaatggcaaagaagatgatattaaaaatcagattcttgacaaattcagcgactttggctttgatggagattattattttgaatacacagaagccaatgtgggacacacttggcgtttgtattctggtaaaaatggcaaagcattgccacgtttccaaaacaaaaagcaagcgcttcaagataaaaatgtttgggtgccagaaaagatcaatgtagttgatatcctcaataagctttttgcgaagtttgacaagaagaaatcctttaaatcacaaattgaagctggagttgaattacaaaaagatgaggaacgtaatgaaacagcttggcaatcgttacgctttgcacttgatttgattcagcaaatccgtaattcgggtgagaagaattccggagatgataatttcttgtactctcctgtccgcaacgataaagacgaacactttgacacgcgtaattataaaaataatggcgaactatcagaaatcagagatgccgatgcaaacggtgcatacaacattgctcgcaagggcttaattatggatacacacataaagcattggattaataatgggcgacccaaaacgaaaattgatggcagcgaagtctctgatttggatttgtttatttccgatagagagtgggatttgtggcttttagatagagaacaatggatgaaagaattgcccacattcgcttcgaaaattgcaaaatacgacagcgacgcccctcaaactgcaaaaagaagaaagaagagataa

SEQ ID NO: 20 - protein, 1297 aa, unidentified
MEMRLMVVFEDFTKQYQVSKTLRFELIPQGKTLENMERAGIVKGDCQRSEDYQEAKKIIDKIYKHILNSSMAKVEIDWSTLAEATKEFRKNKDKKKYENVQVRVRKKLLEDIKNQTITVEKGAKDLYKAMFEKEIVTGEVCAAFPEIDLTDEEKAILDKFKKFTTYFTGFFENRKNIFTDEGISTSFTYRLVNDNFIKFYDNCNLYKDIIASVPGLKGEFKKCFKDLQLFSKCRLEEIFETSFYNHILTQDGIDEFNQLLGGISAKEGEKKKQGLNEVINLAMQKDEGIRNKLRYRAHKFTPLFKQILNDRSTLSFIPETFENDRKVLESIEAYKLYLSEQNILEKAQELLCSMNRYDSRKLSIDGKYISKLSQAIFNSWSKIHDGIKDYKKSLLPKETKKALKGIDMELKQGVSVQDILDALPEENFHEVIVDYTHNLVQKCQAVLSGSLPGNIETDKDKTDIKLVMDPLLDLYRFLEIFSHDNSQGVKTAFEEQLMEILADMKEIIPLYNKVRNFATKKAYSVEKFKLNFNVATLASGWDQNKENANCAIILRKKDMYYLGIYNSSNQPFFEIVEQDDDGFEKMIYKQFPDFNKMLPKCTVSRKNDVAVHFNKSDADFLLNVNTFSKPLLITKEVYDLGTKTVQGKKKFQIDYKRNTGDEAGYKAALKAWIDFGKEFIKAYESTAIYDISLLRKSEDYPDIQSFYKDVDNICYKIAFQKISDEAVNQCVENGSLYLFKLHAKDFSPGASGKPNLHTLYWKYVFEEENLKDVVVKLNGQAELFYRPRSLTQPVVHKKGEKILNKTTRSGEPVPDDVYVELSHFIKNGSTGNLSNEAKKWQAKVSVRNVPHEITKDRRFTQDKFFFHVPLTLNYKSANTPRRFNDLVKAYIKKNPDVHVIGIDRGERNLIYAVVIDGKGKIVEQRSFNIVGGYNYQEKLWQKENERQAARRDWTAVTTIKDLKQGYLSAVVHELSKMIVKYKAIVVLENLNAGFKRMRGGIAERSVYQQFEKALIDKLNYLVFKDAVPAVPGGVLNAYQLTDKFDSFSKMNQQTGFLFYVPAAYTSKIDPLTGFVDCFNWKQIKKNTESRKAFIGLFESLCYDANTNNFVLHYRHKANRYVRGGNLDITEWDILIQENKEVVSKTGKSYRQGKRIIYRKGSGNHGEASPYYPHEELQSLLEEHGISYKAGKNILPKIKAANDNALVEKLHYIIKAVLQLRNSNSETGEDYISSPVEGRKDWCFDSRAADDALPQDADANGAFHIAMKGLLLMKRIRNDEKLAISNEDWLNYIQGLRS

SEQ ID NO: 21 - protein, 1293 aa, unidentified
MRDVVTFENFTKQYQVSKTLRFELIPQGKTLDNMKRDGIISVDRQRNEDYQKAKGILDKLYKYILDFTMETVVIDWDELATATEDFRKSKDKKAYEKVQSKIRTALLEHVKKQKVGTEDLFKGMFSSKIITGEVLAAFPEIRLSDEENLILEKFKDFTTYFTGFFENRKNVFTDEALSTSFTYRLVNDNFIKFFDNCIVFKNVVNISPHMAKSLETCASDLGIFPGVSLEEVFSISFYNRLLTQTGIDQFNQLLGGISVKEGEHKQQGLNEIINLAMQQNPEVKEVLKNKAHRFTPLFKQILSDRSTMSFIPDAFADDGEVLSAVDAYRKYLSEKNIGDRAFQLISDMEAYSPELMRIGGKYVSVLSQLLFNSWSEIRDGVKAYKESLITGKKTKKELENIDKEIKYGVTLQEIKEALPKKDIYEEVKKYAMSVVKDYHAGLAEPLPEKIETDDERASIKHIMDSMLGLYRFLEYFSHDSIEDTDPVFGECLDTILDDMNETVPLYNKVRNFSTRKVYSTEKFKLNFNNSSLANGWDKNKEQANGAILLRKEGEYFLGIFNSKNKPKLVSDGGAGIGYEKMIYKQFPDFKKMLPKCTISLKDTKAHFQKSDEDFTLQTDKFEKSIVITKQIYDLGTQTVNGKKKFQVDYPRLTGDMEGYRAALKEWIDFGKEFIQAYTSTAIYDTSLFRDSSDYPDLPSFYKDVDNICYKLTFEWIPDAVIDDCIDDGSLYLFKLHNKDFSSGSIGKPNLHTLYWKALFEEENLSDVVVKLNGQAELFYRPKSLTRPVVHEEGEVIINKTTSTGLPVPDDVYVELSKFVRNGKKGNLTDKAKNWLDKVTVRKTPHAITKDRRFTVDKFFFHVPITLNYKADSSPYRFNDFVRQYIKDCSDVKIIGIDRGERNLIYAVVIDGKGNIIEQRSFNTVGTYNYQEKLEQKEKERQTARQDWATVTKIKDLKKGYLSAVVHELSKMIVKYKAIVALENLNVGFKRMRGGIAERSVYQQFEKALIDKLNYLVFKDEEQSGYGGVLNAYQLTDKFESFSKMGQQTGFLFYVPAAYTSKIDPLTGFINPFSWKHVKNREDRRNFLNLFSKLYYDVNTHDFVLAYHHSNKDSKYTIKGNWEIADWDILIQENKEVFGKTGTPYCVGKRIVYMDDSTTGHNRMCAYYPHTELKKLLSEYGIEYTSGQDLLKIIQEFDDDKLVKGLFYIIKAALQMRNSNSETGEDYISSPIEGRPGICFDSRAEADTLPYDADANGAFHIAMKGLLLTERIRNDDKLAISNEEWLNYIQEMRG

SEQ ID NO: 22 - DNA, 3894 bp, unidentified
  source 1..3894: mol_type = other DNA
atggaaatgaggctgatggttgtttttgaggattttaccaagcagtaccaagtatctaaaacgctgcgctttgaactcatcccccagggcaagacgctggagaatatggaaagggctgggatcgtgaagggtgactgtcaaagatccgaggattatcaggaagccaagaagattatcgacaagatctacaaacacatcctgaacagcagcatggccaaggtggagatcgactggtctactctcgccgaggcaaccaaggagttccgtaagaacaaggataagaagaagtacgagaacgtccaagtgcgggtgcggaagaagttacttgaggacattaagaaccagactattaccgtggagaaaggtgcaaaagacttgtataaggctatgtttgagaaggaaatcgtgacaggagaggtttgcgcagccttccctgaaattgatctgacggatgaggaaaaagccatcctcgacaagttcaaaaagttcaccacatactttacaggcttttttgagaaccgcaagaatatcttcacagacgagggaatctcaacttcctttacttacaggctggttaatgacaacttcattaagttctacgacaactgcaacctttataaggacatcattgccagtgtgcccggattgaaaggtgagttcaagaagtgttttaaggacttgcagctgttttccaagtgccgacttgaagagatctttgagacatccttttacaaccatatccttacacaagacgggatcgacgagtttaaccagctgttaggggggatttctgctaaagagggcgaaaaaaagaaacagggcctgaacgaggtgataaatttggctatgcagaaagacgagggaattcgaaacaaactccgctatagagcacacaaatttacccctttgttcaagcagattttaaacgatcggagcaccctgagttttattccagagacatttgagaacgacagaaaggtgcttgagagtattgaagcttacaagctctatctgtccgagcagaatattcttgaaaaagcccaggaactgttatgttcaatgaaccggtacgactctcgtaaactcagcatcgacggcaaatatatctcaaaactcagtcaggcgatcttcaacagttggagcaaaatccatgatggcatcaaggactataagaagagtctgcttcctaaagagacaaagaaagccttaaaaggcattgatatggagctaaaacagggagtgtctgtccaggacatcctggatgccctacccgaagagaattttcacgaagtgattgttgattacactcacaacctagtgcaaaagtgtcaagctgtcctgtcagggtcacttccaggtaacatcgaaacagataaagacaagaccgatattaagcttgtcatggaccccttactggatctctacaggttcctggagatattctcacatgataatagccagggggtgaagacggcttttgaagaacagctcatggagattctggctgatatgaaggagatcataccactttataacaaggttaggaactttgcgacgaaaaaggcttattccgtcgaaaagttcaagctcaatttcaatgttgcgacactcgcctctgggtgggatcagaacaaagaaaacgccaattgcgcaattattctcagaaagaaggacatgtactacctcggaatctacaacagctccaatcagccattcttcgagatcgtggagcaggacgacgacgggttcgagaaaatgatttacaaacaattccctgacttcaacaagatgttgcccaagtgtaccgtgagcaggaagaatgacgtagcggttcattttaataagtccgacgccgacttcctcctaaatgtgaacaccttctccaagccgctcctgataacaaaggaagtatatgacctcggcacgaagaccgtgcaaggcaagaagaaatttcaaattgactacaagcgcaataccggcgatgaggctggatacaaagcagcactgaaggcgtggatcgatttcggcaaagagttcattaaagcctatgaaagtacagccatctatgatataagcctgctcaggaagagcgaagactatccagatatacagtctttctataaggacgtcgataacatctgctacaaaatagcgttccagaagatttcagatgaggcagttaatcagtgtgttgaaaatggctctctgtacttgttcaaactccacgctaaggatttttcacctggagcatccggcaaacccaatcttcacactctgtactggaagtatgtatttgaagaggaaaatctgaaggatgtcgtcgtcaaacttaatgggcaggccgaactgttctatcgcccacggtcactgacccaacccgtggtccacaagaaaggcgaaaaaatcttgaacaaaaccacccggtcaggtgagcctgtaccagatgacgtctacgtggaactctcacattttatcaaaaacggttctactggcaatctgagtaatgaagcgaaaaaatggcaggctaaggtgagcgtgaggaacgtaccccacgaaattactaaagatcgccgcttcactcaagacaaattcttctttcatgtgcctctgacactgaactataaaagcgcaaataccccacgaagattcaatgatctggttaaggcttacatcaagaaaaatccagacgtccatgtgatcgggatcgaccggggtgagcggaacttgatttacgctgtggtaatcgacgggaaagggaagatcgtggagcagagatcgttcaacatagtgggaggatacaactaccaggaaaaactgtggcagaaagagaatgaaaggcaggctgctcgtcgagattggactgccgtgaccacaataaaagatctgaaacagggctatctcagcgctgtggtgcacgaactttccaagatgatagtaaaatacaaggccattgtcgtcctggagaatttaaatgcgggatttaagcgaatgagaggcggtattgcagaaagatccgtgtaccagcaatttgagaaagctctaattgacaagttgaattacctggttttcaaggacgccgtacctgcagtgccgggaggagtcctcaacgcctatcagcttaccgacaagtttgattccttttccaaaatgaaccagcaaacagggttcctgttttacgtccccgccgcatacactagcaagattgaccctttgaccggattcgtggactgctttaactggaaacagatcaaaaagaacaccgagagtcgaaaggcatttatcgggctattcgaatctctgtgctatgacgcaaatactaataatttcgtgttgcattaccggcacaaggccaataggtatgttcgcggggggaatctggatattactgagtgggatatccttatccaggagaacaaggaagtcgtttccaaaaccggcaaatcctatcgtcagggcaaaagaataatctatcggaagggaagcggcaaccatggcgaagccagcccttactacccgcacgaggagctgcagagtctcctggaggagcacggtatctcttacaaggctgggaaaaacatactgcccaagataaaggctgcaaatgacaacgccctagtcgagaaactgcactatattataaaagctgtgctacagctgaggaatagtaattctgagactggagaagattatatttcgtctccggtggagggccgcaaagattggtgcttcgatagcagagccgccgatgatgccttgccccaggatgccgatgccaacggtgcctttcatatagccatgaaaggcctgttattaatgaaacggatcagaaatgatgagaagctggcaatctcgaatgaagactggttgaactatattcaaggactgcgctcttga

SEQ ID NO: 23 - skipped

SEQ ID NO: 24 - DNA, 36 bp, unidentified
  source 1..36: mol_type = other DNA
atctacgagagtagaaattaacattgtcagttagac

SEQ ID NO: 25 - DNA, 35 bp, unidentified
  source 1..35: mol_type = other DNA
tctacgagagtagaaattaacattgtcagttagac

SEQ ID NO: 26 - DNA, 36 bp, unidentified
  source 1..36: mol_type = other DNA
atctacgagagtagaaattaacatatactgtcagac

SEQ ID NO: 27 - DNA, 36 bp, unidentified; identical to SEQ ID NO: 26
  source 1..36: mol_type = other DNA

SEQ ID NO: 28 - RNA, 36 nt, unidentified
  source 1..36: mol_type = other RNA
gtctaactgacaatgttaatttctactctcgtagat

SEQ ID NO: 29 - RNA, 36 nt, unidentified
  source 1..36: mol_type = other RNA
gtctgacagtatatgttaatttctactctcgtagat

SEQ ID NO: 30 - DNA, 3894 bp, unidentified
  source 1..3894: mol_type = other DNA
atggagatgagattaatggttgtatttgaggatttcacaaaacagtatcaagtgtcgaaaacattaagatttgaattgattccccaaggaaagaccttggaaaatatggaacgggcaggtattgtaaaaggagattgtcaacgtagtgaggactatcaagaagcaaagaaaattatcgataaaatttataaacacattttaaattcatccatggctaaggttgaaattgattggtcaaccttagcggaagcaactaaagaatttaggaaaaataaggataaaaagaaatatgaaaatgttcaagttcgtgttagaaagaaactgcttgaagatataaaaaatcaaacaatcacagtagaaaagggggcgaaagatctttataaggcaatgtttgagaaagaaatcgttacgggggaagtatgtgctgcatttcccgaaatagatttaacggatgaagaaaaagccatattggataaatttaaaaaatttacaacgtattttacaggattctttgaaaacagaaaaaatatctttactgatgaaggtatcagtacttcttttacgtatcgactggtaaatgataattttataaaattttatgataattgcaatctttataaagatattattgcctctgttccgggattgaagggcgagtttaagaaatgttttaaagacttacagcttttttctaaatgtagactagaagaaatctttgagacttctttttataatcatattttgacacaagacggtatcgatgaatttaatcaactcttgggcggaatttccgcaaaagagggagaaaaaaagaaacaaggcttaaatgaagttatcaatttagctatgcaaaaagacgagggaattagaaataagttaagatatagagctcataaatttacgcctctttttaaacaaattttaaatgaccggtctaccttgtcatttatacccgaaacttttgaaaatgaccgtaaagttttggagtctatagaggcatataaattatatttatctgaacagaatatattagaaaaagcacaagaattactgtgcagcatgaatcggtatgattctcgaaagttaagtattgacggtaagtatatttcaaagctgtctcaggctatctttaactcttggagtaagattcatgatggaataaaagattataagaagtctttacttcctaaagaaacgaaaaaagctttgaaaggcattgacatggaattaaagcagggagtaagcgtgcaggacatattggacgcacttcctgaagaaaattttcatgaagttatagttgattatactcataatcttgtgcaaaaatgtcaagctgtattgagcgggtctttgcctggtaatattgaaacggataaagataaaacagatattaagctagtaatggacccactgttggatttgtatcggtttttagaaatattcagccatgataattcccaaggtgtaaaaacggcatttgaagaacaattgatggaaattttggcagatatgaaggaaatcatccctttgtacaataaggttagaaatttcgctactaaaaaagcatattcagtagaaaaatttaaacttaattttaatgtagcgacattggcatccggttgggatcagaacaaagaaaatgcaaattgtgcaattatacttcgaaagaaggatatgtattatttgggtatatataattcttccaatcagccgttttttgaaatagtcgagcaagatgatgacgggtttgaaaagatgatatataaacaatttcccgattttaataaaatgttacctaaatgtacagtatcacgtaaaaatgatgttgcagttcattttaataagtctgatgcagattttttattaaatgtaaatacgttcagtaaaccgcttcttataactaaagaagtctatgatttaggcactaaaactgttcaaggaaaaaagaaattccagattgattataagagaaacactggggatgaggccgggtataaggctgccttgaaggcatggattgacttcgggaaagagttcataaaggcttatgaaagcacagctatatacgatatatcattgttacgaaaaagcgaagattatcccgatatccaatctttttacaaggatgtagacaatatatgctataaaatcgcctttcaaaagatctctgatgaagcagtaaatcaatgtgtagaaaatggttctttatatctttttaaattgcacgccaaggatttttcgcccggtgccagtgggaaaccgaatttacacacgctgtattggaagtatgtatttgaagaagaaaacttgaaagatgtagttgtgaaattaaacggacaggcagaattgttttatcgcccccgaagtttaacgcagccagttgtacataaaaaaggagagaaaattcttaataaaactactcgatcgggagaacccgttcccgatgacgtatatgttgagttgtctcactttattaaaaacggaagtacgggcaatttgtcgaatgaggcaaaaaagtggcaggcgaaggtaagcgttcgcaatgtgcctcatgagattacaaaggatcgcagatttacacaggataaattctttttccatgtgcctctgactttgaattataaatctgccaatacaccccggcgctttaatgatttagtcaaagcgtatattaagaagaatccggatgtgcatgtcattggaattgaccggggcgaacgaaatcttatttatgcagttgttattgacggaaaaggtaagattgttgaacagcggtccttcaatatcgtagggggctataattaccaagaaaaattatggcaaaaagaaaatgaacggcaggcagcgagacgcgattggaccgctgtcaccacgattaaggatttaaaacaaggatacctgtccgctgttgtacatgagttatctaaaatgatagtgaagtataaggctattgttgtacttgaaaacctcaacgcgggttttaaacgtatgcgaggcggcattgcggaacgatccgtttaccagcagtttgaaaaggccttaatcgataaattaaattatttagtttttaaagatgcagtccctgcggtgcccggaggagtcttaaatgcgtatcaattaaccgacaaatttgacagtttcagtaaaatgaaccagcaaacgggatttttgttttacgtgcccgcagcttatacttctaaaattgatcccttaacaggatttgtagattgttttaattggaaacaaataaagaaaaatactgagagtcggaaggcatttattggtttgtttgaatcgctttgctatgacgcgaatacgaataattttgtgcttcattataggcataaggctaaccgatatgttcgtggcggtaatttggacattacggaatgggatatactgattcaagaaaataaagaagtagtaagtaaaaccggcaaatcctatcgccaagggaaacgcattatctacaggaaaggctccggtaatcatggggaagcgtctccctactatcctcacgaagaactgcaatctttgttggaagaacatggaatttcatataaagcaggcaagaacatcttacccaagattaaagccgctaatgacaacgcattggtagaaaagttgcactacattattaaggccgtgcttcaattacgcaacagcaatagtgaaaccggagaggattatatcagttctcccgttgaaggccgcaaagattggtgctttgatagtagagctgcagatgatgcgttaccacaagatgctgatgctaacggtgcctttcatattgccatgaaaggattgttattaatgaaacggattcggaatgatgaaaagcttgcaattagtaatgaagattggctgaattacatacaaggattgagaagctaa

SEQ ID NO: 31 - DNA, 3882 bp, unidentified
  source 1..3882: mol_type = other DNA
atgagagatgtggtgaccttcgagaattttacaaaacagtaccaggtgagcaagactctgaggtttgaactgatcccccaggggaaaacactggataacatgaaaagagatggaatcatttccgtggacaggcagcgcaacgaggactatcagaaggccaagggcatcctggataagctgtataaatacatcctggacttcaccatggagaccgtggtgatcgactgggacgagctggcaaccgccaccgaggatttcaggaagagcaaagataagaaggcctacgagaaggtccagagcaagatcagaacagctctgctggagcacgtgaaaaaacagaaagtgggcaccgaggatctgttcaaggggatgttcagcagcaagatcattaccggcgaagtgctggcagctttccccgagatccgcctgtccgacgaagagaatctgattctcgaaaagttcaaggacttcacaacctacttcacaggattcttcgagaaccggaagaatgtgtttactgacgaggccctgagcaccagcttcacttaccggctcgtgaacgataattttatcaagttcttcgataactgcatcgtgtttaagaacgttgtgaatatcagccctcatatggccaagagcctggagacctgcgcctccgatctgggcatcttccctggcgtttccctggaggaggtgttctccattagtttctacaatagactgctgacccagactggcattgatcagttcaaccagctgctgggcggaatctctgtgaaggaaggagagcacaagcagcaggggctgaatgagatcatcaaccttgccatgcagcagaatcctgaggtcaaagaggtgctgaagaataaggcccaccggtttacccccctctttaagcagattctgtccgacaggtccaccatgtcctttattcctgatgccttcgccgatgacggcgaagtgctgagcgccgtcgacgcataccgaaaatacctgagtgagaagaacatcggcgatagggcctttcagctgatcagcgatatggaagcctacagccccgagctgatgagaatcggcggcaagtatgtgtccgtgctgtcacagctgctgttcaactcttggagcgagatcagggatggagtgaaggcctacaaggaaagcctgatcactggcaagaagaccaagaaggaactggagaacatcgacaaggagatcaaatatggagtgacactccaggagatcaaggaggctctgcctaagaaagacatttatgaggaggtgaagaaatacgccatgtccgtggtgaaggactatcatgcaggcctggccgagcctctgccagaaaaaattgagaccgatgatgagagggcttcaatcaagcacatcatggatagcatgctggggctgtatagatttctggagtactttagtcacgacagcatcgaggacactgatcctgtgttcggagagtgcctggacactatcctggacgatatgaatgagacagtgcctctgtacaataaggtgcgcaatttcagcacaaggaaggtgtacagcacagagaagttcaagctgaacttcaataatagctccctggccaacggatgggataaaaacaaagagcaggctaatggcgcaattctgctgagaaaggagggggagtatttcctgggaatcttcaacagcaagaataaacccaagctcgtgtccgacggcggcgccggcatcggctacgagaagatgatttacaagcagttccctgacttcaagaaaatgctgccaaagtgcaccatcagcctgaaggacaccaaagcccacttccagaaatctgatgaagactttaccctgcagaccgataaattcgagaagtccatcgtgatcacaaagcagatctacgacctggggacccagactgtgaacggcaagaaaaagttccaggtggattaccccaggctgaccggagatatggagggataccgggccgcactgaaagagtggatcgatttcggcaaggagtttatccaggcctacacatccacagccatctacgacacttccctgttccgggactcatcagattaccctgacctgcccagcttttacaaggacgttgacaacatctgctacaagctgacctttgaatggatcccggacgcagtgattgacgattgcatcgatgacgggtccctgtacttgttcaagctgcacaacaaagacttttccagcggctccatcggcaagccaaatcttcacacactctattggaaagccctgttcgaggaggaaaacctgtccgatgtggtggtgaagctgaatggccaggcagagctgttttatcggccaaagagcctgacaaggcctgtggtgcacgaggagggtgaggtgatcatcaataagactaccagcaccggcctccctgtgccagatgacgtgtacgtcgagctgtccaagttcgtgcgcaacggcaagaagggaaacctgaccgacaaagccaagaactggctggacaaagtgaccgtgcggaaaaccccccacgccatcaccaaagatcggcgctttacagtggacaagttcttcttccacgtgcccattacactgaactataaggctgactcaagcccttatagattcaacgacttcgtgcgccagtacattaaggactgctcagatgtgaagattatcggcattgacaggggagagaggaacctgatttacgccgtggtgatcgacggcaagggcaacatcatcgaacagagaagttttaatacagtgggcacctacaactaccaggagaaactggaacagaaggaaaaggagaggcagaccgccaggcaggactgggcaaccgtgacaaaaattaaagatctgaagaagggctacctgtctgccgtggtgcacgagctgtccaagatgatcgtgaagtacaaggctatcgtggccctggagaacctgaatgtggggtttaaacggatgagggggggcattgccgagaggtctgtgtatcagcagttcgaaaaggccctgatcgacaagcttaattacctcgtgtttaaggacgaagaacagagtggttatggtggggtcctgaacgcctaccagctgaccgataagttcgagtccttcagcaaaatgggccagcagaccgggtttcttttctacgtgcccgcagcctacaccagcaaaatcgaccctctcacaggcttcattaaccctttctcttggaaacacgtgaagaatcgggaggacaggaggaacttcctgaacctgttcagcaagctgtattacgatgtgaacacccacgacttcgtgcttgcctaccaccacagcaacaaagatagtaaatacacaatcaagggaaactgggagatcgccgactgggacattctgatacaggagaacaaggaggtgttcggcaagaccggcacaccttactgcgtgggcaaaaggattgtgtacatggatgattccaccaccggccacaatagaatgtgtgcttactatccacataccgaactgaaaaaactgctgtccgagtacggaattgagtacacatctggacaggatctgttgaagatcatccaggagttcgatgacgacaaactggtgaaaggcctgttctacatcattaaggctgctctgcagatgcggaattccaacagtgagacaggcgaagactacatctcctcccccatcgagggcaggcctggcatctgttttgacagcagagccgaggccgacacactgccttatgacgcagacgccaatggcgcttttcacattgccatgaaggggctgctgctgaccgagcggatccggaatgatgataagctggccatcagcaacgaggaatggctgaactatatccaagagatgcggggctag

SEQ ID NO: 32 - protein, 1262 aa, unidentified
MKNLKEFHNLYPVQKTLRFKLEPIGKTEEFIERAQILENDERRADEYLKVKEYIDRYHREFIENALSQPLLKVESEGKQDSLEDFADCYNNDNSEKRSDNLEKIQDKLRTQIVKGFSKLPAFARIAKKELIKEDLPKFLKDKNEKEIVSHFDEFTTYFTGFHQNRMNMYTAEAKSTSIAFRLINQNLVKFVDNSNILEKVVPVLGKDIIAQLDKDFEPFLNVDSALDLFKIDNYNEVLTQLQIELYNAIIGGRVDEGNKVEIKGLNQYINEFNQTHEKSLRIPKLKPLFKQILSENVGVSFRMEQFTDASQVQTAIKEEYIKLESSVFDKLKEMIKSLPTFNLNGIYLANDLGLTDICQRYYGAWDKLNNALVAEFDAVVPRKKTQSQEKRDNQVKKYLKSVKSISLGKIDSLLADVTEKSIVDYFTNLGAIDNETTQRENLFALIQNRYISLKEVLDCPTPSDELLRKNIEGIKDLLDAIKDLQRFIKPLCGCGEELDKDEMFYSDFSPLYETLDDIITPLYNKVRSYLTKKPYKLDKFKLNFETPTLLQSWPNYQAYSCAIFKEDDNHYYLAILDKNNRSCLNTIVPPISKNDIIGLVKHLQGGDMGKNVQNLMRIDGKTRKVNGRKETSGPNAGQNIRLEESKKTYLPHEINEIRIEKSFSLNSPNYRRECLNKYIDFYKPLVEEYYSEFDFEFKEASEYRDFSQFTNHINQQSYQLKIIPFSKKYLKTLVDNGQVFLFRILNKDFSPYSKGRPNLHTIYWKMLFDDNNLKDVIYKLNGKAEMFFRRSSITNPVIHAANKEIANKSAYNKQHKAVSKFDYDIIKDRRFTRNQYEFHVPITMNFKSAGSVRFNQEVLSFIKEKGIKHIIGIDRGERHLLYLTMINMKGEIVEQFSLNDVASNPNNPEYKQDYNELLSIKEGDRLSARRNWSTIENIKELKSGYLSQIVHLLSKMMIENDAILVLENLNTGFMRGRQKVEKSVYLKFEKMLIDKLNYVVDKTAAPNEPSGALKALQLTDTYDNFNKYQKGNVRQCGFVFYIPAWNTSKTDPVTGYVNLFDTRLSTIGEIKSFFSKFDRIKYNSKNDAFEFTFDYNNFTTRAEGTRTCWTISSQGERIFTHRSKEQNNQFVSETVHPTQIFKDVFKMAGCEINGNLKEGIASIESLEPLKQLLHAFKLVIQMRNSITGTEVDFLLSPAIDAKGTNFDSRKGISTLPENADANGAYNIARKGLMIVEQIQNADDIANIKYSVSNNDWLKFAQG

SEQ ID NO: 33 - protein, 1273 aa, unidentified
LCSIFAHMAINFAREIKKYYLCIINIKKILNMECLKDFYNQYSVQKTLRFKLEPVGKTEEFIERAQVLENDERRAAEYKKVKDLIDNYHRWFIEQALSAPLLKVDSTGDNDSLEDFQDCYNNDTSEKRSDNLEKIQGKLRSQIVKGFSKHPAFKHIDKKELITTDLKQFLTDPNEIDIVSHFANFTTYFTGFHQNRMNMYSVEAKSTSISFRLINQNLVKCVDNSKILEKVKPALGADIFSKLNHDFEPFLNVVDALDLFKVENYNEVITQPQIELYNAIIGGRVDNDSKVEIKGLNQYINEYNQTHSKQERLPKLKPLFKQILSEREGVSFRIEQFEKANQVQDAINEAYNDLHANVFTKLKDLLLNLSSFDLDGVFVANDQSLTDISQRHYGAWDTVKNAVVASYDMTNPRKKSQSQEKRDEQVKKHLKSIKSLSLATIDNMLKDSTGLSIVDYFTTLGAVNNENLQHENLFALIENRYNAARSVLDSDSPSDELLRKNITQIKDLLDSIKDLQRFIKPLCGSGEEPLKDEIFYSDFSALYESLDDTITPLYNKVRSYLTRKPYSLDKFKLNFDNSQLLDGWDVNKEKDYLSILLRKNGYYYLAIANKNDKSALSQINQCDMISGDCYEKLNYKLLPSPFKMLPKVFFSRKGIEVYNPSQEILDIYNEKKFQLGDKFDKESLIKLIDFYKNAIPQNESWQSFDFSFAPSQSYESINEFYSVIENQGYKIDFKKVPSSLINLLIDQGLLYVFKIANKDFSPHSKGRPNLHTIYWRMLFDENNLKNVVYKLNGRAEMFYRKSSIQNPVIHKAHHDIKNKSEYNKLHKPSSKFDYDIIKDRRFTRNQYEFHVPITMNFKPAGSGQFNRDVLKFIKAKGIKHIIGIDRGERHLLYLTMIDLKGRIVEQFSLNSVASNPNNPDFKQDYNTMLAIKEGDRLNARRNWSTIENIKELKQGYLSQIVHLLSKMMIENDAILVLENLNSGFMRGRQKVEKSVYLKFEKMLIDKLNYVVDKGTDLNEPCGALKALQLTDSYEKFNKFQKGNVRQCGFVFYIPAWNTSKIDPATGFVNLFDTRLSTIGEIKAFFSKFDRISYDASNDVFEFSFDYNNFTSRAQGTRTRWTVTTRGERIFTHRSKEKNNQFVSELVSPTSLLKDVLEKTGTNLQGNLKEAIASLQSLDELKQLLHAFKLTMQMRNSVTGTDVDYLISPAIDAKGNNFDSRECDSTMPLNADANGAFNIARKGLMIVEQIQKVDDIGNLKYAVTNKDWLTFAQK

SEQ ID NO: 34 - DNA, 3789 bp, unidentified
  source 1..3789: mol_type = other DNA
atgaagaacctcaaggagtttcataatctctatcctgtgcagaagactctgcggtttaagctggaacccatcggtaagaccgaagaattcatcgagagagcacagattttggagaatgatgagcggcgcgccgacgaatatctgaaggtaaaggaatacattgaccggtaccatagggaattcattgagaacgccttgtcacagcctctgctcaaagtcgagagtgaaggcaaacaggattccttggaagacttcgcagactgttataacaacgacaatagcgagaaaagatccgataatctggagaagatccaagataaactgagaacccagatcgttaaaggattcagcaaactaccagcctttgcccggatcgcaaagaaggagctaattaaggaagatctgcccaaattcttaaaggataaaaacgagaaggagatcgtgtctcattttgacgaatttacaacctactttaccggctttcatcagaataggatgaacatgtatactgcagaggcaaagagtacatccatagcatttcgccttatcaatcagaacctggtgaagtttgtagacaactctaatattctcgaaaaggttgtcccagtactgggaaaagacatcatcgctcaactggacaaagatttcgagcctttcctcaacgtagattctgctctggacttattcaagatcgataactacaacgaggtgctcactcagcttcagattgagctgtataatgccatcatcgggggcagagtggatgaaggtaacaaagtcgagataaagggactgaatcagtatattaacgagttcaaccagacccatgagaagagtctgcgtatacccaaactcaaacctctgttcaagcagatacttagcgagaacgtgggcgtgtcgttccgcatggagcagttcacagatgccagccaagtgcagactgctatcaaagaggaatacatcaaactggaatcctcagttttcgacaaactcaaggagatgataaaatcactccccaccttcaacctgaacgggatctacctggctaatgatttgggtctgacggacatctgccaaagatactatggcgcgtgggataaacttaacaacgccctggttgcagaattcgacgcggtggtacctaggaagaaaacccagagtcaagagaaaagggacaaccaggtcaaaaaatacctgaagagcgtgaagtccatcagcttggggaaaatagactcccttctcgctgacgttacagaaaagtcaattgtggactatttcacaaatctcggagctatcgataacgaaaccactcagcgcgaaaacctgtttgctctcatacagaatcgctacatctctctcaaggaggtccttgactgtccaacaccttctgatgaactgcttaggaagaatattgaggggattaaggacttattggatgcaataaaggatctacaacggtttataaaacccctatgtggctgcggagaggaactagataaggatgaaatgttttacagcgacttttcacctctctacgagactctggatgacattataactcccctgtataataaggtgaggagctacttgaccaagaaaccctataagcttgacaagttcaagctcaattttgagacgcccaccctcttgcagtcttggcctaactatcaagcctactcatgtgcgatcttcaaggaggatgataatcattactacttagccatcctggacaaaaacaacaggtcgtgcctgaataccatcgttccacctatatccaagaacgacataatcggcctggtcaagcacttacagggcggcgatatgggaaaaaatgtgcagaatttgatgcgaatcgacggtaaaactcggaaagttaatggccggaaagagacatctggcccaaatgctggccagaacattaggcttgaggagtcgaagaagacatatctgccgcacgagattaacgagatccgaattgagaaaagtttcagcttaaactctccgaattatagacgcgaatgcctgaacaagtacattgatttctacaaacctctggtcgaggagtactattcagagtttgactttgagttcaaagaggctagcgaatatcgggacttctcccagtttactaatcacatcaaccagcaatcataccagctgaaaattatccccttcagcaaaaagtacctgaaaaccctagtggataacgggcaggtgtttttattccggatcctcaacaaggactttagcccatattctaaggggcgtccaaacctgcacacgatctactggaagatgttgtttgacgacaataacctgaaggacgtgatttataagctcaatggtaaagcggagatgttttttaggcggtcctctattacaaacccagtgatacatgctgcaaacaaagaaattgccaataagtctgcctacaataaacaacataaggccgtgtccaagttcgattatgacattataaaggatcgccgattcacaagaaaccagtacgagttccacgtccccatcaccatgaactttaagtccgccggatcagtcaggttcaatcaagaggttttgagcttcattaaggagaagggtattaagcacattattggaattgatcgaggtgaacggcaccttctttatctgacaatgatcaacatgaaaggagagatcgtcgaacaattttctctcaatgacgttgcctcaaatccgaataatcccgaatacaaacaagactataacgagctcctctctatcaaggagggagatagactgtcggcccgcaggaattggtccacaatcgagaacattaaagagctaaagtctggttaccttagccagattgttcacctgcttagtaagatgatgatcgaaaatgacgccattttagtgctagagaatctgaacacgggctttatgagaggtagacagaaggtggaaaaaagcgtctatctgaagttcgagaaaatgcttatcgataagctgaattatgtggtagacaaaacagctgcaccaaacgaaccaagtggggcattaaaagctctccagctcactgacacgtacgataacttcaacaagtaccagaagggaaatgtgaggcagtgcggctttgtcttttatatcccagcctggaacacctctaaaaccgaccccgtcacagggtatgtcaacttgttcgacactcgtctcagtaccatcggggaaatcaagagttttttcagcaagttcgatcgtatcaaatacaacagtaagaacgatgccttcgagttcacattcgactacaataatttcactacgcgagcggaggggactcgtacctgctggaccatctccagccagggagaaagaatatttacccaccgctcaaaggaacagaacaatcagttcgtgtccgaaaccgtgcaccccactcagatctttaaagacgtgttcaagatggctggatgtgaaatcaatgggaacctgaaagaagggatcgcatccattgaatccctggagccgttgaagcagcttctgcacgcctttaaactggtgattcagatgcgcaatagtattaccggaactgaagtggactttctgctgagccctgcaattgacgctaaaggcacaaattttgattcccgaaaaggcattagcacattgcccgaaaatgccgacgccaacggggcttacaatatagccagaaaaggcttgatgattgtagagcagattcaaaatgcggatgatatcgctaatatcaagtactcagtttccaataacgattggctgaagtttgcccaaggctga

SEQ ID NO: 35 - DNA, 3819 bp, unidentified
  source 1..3819: mol_type = other DNA
ctttgcagcattttcgcccacatggccatcaacttcgccagagaaatcaagaagtactacctgtgcatcatcaacataaagaagatcctgaacatggaatgcctgaaagatttctataatcaatacagcgtccagaagaccctgagattcaagctggaacctgttggaaagaccgaggaattcatcgagagagcccaagtgctggagaacgatgaacgccgggccgctgaatacaagaaggtcaaggacttgatcgataactaccacagatggttcatcgagcaggccctgagcgctcctttgttaaaggtggacagcaccggggataacgattccctggaagatttccaggactgctacaacaacgataccagcgagaagagaagcgacaatctggagaaaatccagggcaagctgcggtctcagatcgtgaagggctttagcaagcaccccgccttcaagcacatcgacaaaaaggagctgatcacaaccgacctgaaacagtttctgaccgaccccaacgagatcgacatcgtcagccacttcgccaacttcaccacctacttcaccggcttccaccagaacagaatgaacatgtacagcgtggaagccaagagcacctccatctcttttagactgatcaaccagaatctggtgaagtgcgtggataattccaagatcctggaaaaagtgaagcctgctctcggcgccgacatcttcagcaagctgaaccacgattttgagcctttcctgaatgtggtggacgccctggacctgttcaaggtggaaaactacaatgaggtgatcacacaacctcagatcgaactgtacaacgccataattggaggcagagtggacaacgactcgaaggtggaaatcaaaggcctgaaccagtacatcaacgagtacaaccaaacacactctaaacaggagcggctgcctaagctgaaaccactgtttaagcagatcctgagcgagagagagggcgtgagcttcagaatcgagcaatttgagaaagcgaaccaggtccaggacgccatcaacgaggcctacaatgacctgcacgccaacgtgttcacaaagctgaaggatctgctgctgaacctgtctagcttcgatctggacggcgtgttcgtggccaacgaccagtctcttacagacatcagccagcggcattacggcgcctgggatactgtgaagaacgctgtagtggccagctacgacatgacaaatcccagaaaaaaaagccagtctcaggagaagagagatgagcaagtgaagaagcacctgaagtctatcaagtcactaagcctggccaccatcgacaatatgctgaaggattctaccggcctgagcatcgtggattatttcaccaccctgggcgcggtgaacaatgaaaatcttcagcacgagaacctgttcgccctgatcgaaaaccggtacaacgccgccagaagcgtgctggacagcgactccccaagcgacgaactgctgagaaagaatatcacccagatcaaagacctgctcgacagcatcaaggacctgcagcggttcatcaagcccctgtgcggaagcggcgaagagcctctgaaggacgagattttctacagcgatttttctgccctgtacgaaagcctcgatgacaccatcacccctctgtataacaaggtgcggtcttacctgaccagaaagccatactctctggacaagttcaagctgaacttcgataacagccagctgctggacggctgggacgttaacaaggaaaaagactacctgagcatcctgctgagaaagaacggatactactacctggctattgccaataagaacgacaagagcgccctgtcccagatcaaccagtgtgatatgatcagcggcgactgttacgagaagctgaattacaaactgctgcctagccctttcaagatgctgcctaaggtgtttttcagcagaaagggcatcgaggtttacaaccccagccaggagatcctggacatctacaacgagaaaaagtttcagctgggcgataaattcgataaggaatctttaatcaagctgatcgacttctacaagaatgccatccctcagaacgagtcctggcagtcattcgacttcagctttgccccttcccaatcctacgagagcatcaacgaattctactccgtgatagagaaccagggctacaaaatcgactttaagaaggtgccctcttctctcatcaacctgctgatcgaccagggcctgctgtacgtgttcaagatcgccaataaggacttttctcctcacagcaagggtaggcctaatctccatacaatctactggcgcatgcttttcgacgagaacaacctgaagaacgtggtgtataagctgaacggcagagccgagatgttctacagaaaaagctctatccagaaccctgtgatccacaaggctcaccacgacatcaagaacaaatctgaatataacaagctgcacaagccaagcagcaagtttgattacgacattatcaaggacagaaggtttaccagaaatcagtacgagttccacgtgccaatcaccatgaacttcaagcctgcaggcagcggccagttcaaccgggacgtgctgaaattcatcaaagccaagggaattaagcacattatcggaatcgatagaggcgagaggcacctgctgtatctgacaatgatcgacctgaagggccgaatcgtggaacagttcagtctgaacagtgtcgccagcaaccccaacaaccctgacttcaagcaggattacaacacaatgctggccatcaaagagggcgaccgcctgaacgcccggagaaactggagcaccatcgagaacatcaaggaactgaagcagggctatctgagccagatcgtgcacctcctgagcaagatgatgatcgagaatgacgccatactggtactggaaaacctgaacagcggattcatgagaggcagacagaaggtggagaagagcgtgtacttgaaattcgagaagatgctgattgacaagctgaactacgtggtggacaagggcacggatctgaacgagccttgcggcgccctgaaagctctgcagctgacagacagctacgagaagttcaacaaattccagaagggaaatgtgcggcagtgcggcttcgtgttctacatccccgcctggaacacctccaagatcgaccctgctaccggcttcgtgaacctgtttgataccagactgtccacaatcggcgagatcaaggccttcttcagcaagttcgaccggatctcttacgacgccagcaacgacgtgttcgagttcagctttgattacaacaacttcaccagcagagcccagggcacacggaccagatggaccgtgaccacacggggcgagagaatctttacccacagatccaaagagaagaacaaccagttcgtgagcgagctggtgagccccacatctctgctgaaagacgtgctggaaaagacaggaacaaacctccagggcaatctgaaggaagccatcgccagcctgcagagcctggatgagctgaagcaactgcttcatgccttcaagctgacaatgcagatgcggaattccgtgaccggcaccgacgtggactacctcattagcccagccatcgacgctaaaggaaacaacttcgatagccgggaatgtgactctaccatgcctctgaatgctgacgccaacggcgccttcaatatcgctagaaagggcctgatgatcgtggaacaaatccagaaagtggatgacatcggcaacctgaagtacgccgtaacaaacaaagattggctgaccttcgcccagaag

SEQ ID NO: 36 - DNA, 36 bp, unidentified
  source 1..36: mol_type = other DNA
atctacaatagtagaaattttggtctatagttagac

SEQ ID NO: 37 - DNA, 36 bp, unidentified; identical to SEQ ID NO: 36
  source 1..36: mol_type = other DNA

SEQ ID NO: 38 - DNA, 36 bp, unidentified
  source 1..36: mol_type = other DNA
gtctatactaagaccaaaatttctactattgtagat

SEQ ID NO: 39 - DNA, 36 bp, unidentified; identical to SEQ ID NO: 38
  source 1..36: mol_type = other DNA

SEQ ID NO: 40 - RNA, 36 nt, unidentified
  source 1..36: mol_type = other RNA
gtctaactatagaccaaaatttctactattgtagat

SEQ ID NO: 41 - RNA, 36 nt, unidentified
  source 1..36: mol_type = other RNA
gtctatactaagaccaaaatttctactattgtagat

SEQ ID NO: 42 - protein, 1297 aa, unidentified
LCSIFAHMAINFAREIKKYYLCIINIKKILNMXXLKXFXNXYXVQKTLRFKLEPXGKTEEFIERAQXLENDERRAXEYXKVKXXIDXYHRXFIEXALSXPLLKVXSXGXXDSLEDFXDCYNNDXSEKRSDNLEKIQXKLRXQIVKGFSKXPAFXXIXKKELIXXDLXXFLXDXNEXXIVSHFXXFTTYFTGFHQNRMNMYXXEAKSTSIXFRLINQNLVKXVDNSXILEKVXPXLGXDIXXXLBXDFEPFLNVXXALDLFKXXNYNEVJTQXQIELYNAIIGGRVDXXXKVEIKGLNQYINEXNQTHXKXXRJPKLKPLFKQILSEXXGVSFRXEQFXXAXQVQXAIXEXYXXLXXXVFXKLKXXJXXLXXFBLBGXXXANDXXLTDIXQRXYGAWDXXXNAXVAXXDXXXPRKKXQSQEKRDXQVKKXLKSXKSJSLXXIDXXLXDXTXXSIVDYFTXLGAXBNEXXQXENLFALIZNRYXXXXXVLDXXXPSDELLRKNIXXIKDLLDXIKDLQRFIKPLCGXGEEXXKDEXFYSDFSXLYEXLDDXITPLYNKVRSYLTXKPYXLDKFKLNFXXXXLLXXWXXNXZXXXXXIXXXXBXXYYLAIXBKNBXSXLXXXXXXIXXXDXIXXXXXXXXGDXXXXXXNXXXJXXXXXXXXXXXXXXXXXXXXXXXXXXXXXXYXPXXEIXXIXXEKXFXLXXXXXXXEXLXKXIDFYKXXXXXXEXXXXFDFXFXXXXXYXXXXZFXXXIXXQXYXJXXXXXXXXXJXXLXDXGXXXXFXIXNKDFSPXSKGRPNLHTIYWXMLFDXNNLKBVXYKLNGXAEMFXRXSSIXNPVIHXAXXXIXNKSXYNKXHKXXSKFDYDIIKDRRFTRNQYEFHVPITMNFKXAGSXXFNXXVLXFIKXKGIKHIIGIDRGERHLLYLTMIBXKGXIVEQFSLNXVASNPNNPXXKQDYNXXLXIKEGDRLXARRNWSTIENIKELKXGYLSQIVHLLSKMMIENDAILVLENLNXGFMRGRQKVEKSVYLKFEKMLIDKLNYVVDKXXXXNEPXGALKALQLTDXYXXFNKXQKGNVRQCGFVFYIPAWNTSKXDPXTGXVNLFDTRLSTIGEIKXFFSKFDRIXYBXXNDXFEFXFDYNNFTXRAZGTRTXWTXXXXGERIFTHRSKEXNNQFVSEXVXPTXJXKDVXXXXGXXJXGNLKEXIASJZSLXXLKQLLHAFKLXXQMRNSXTGTXVDXLJSPAIDAKGXNFDSRXXXSTXPXNADANGAXNIARKGLMIVEQIQXXDDIXNJKYXVXNXDWLXFAQX

SEQ ID NO: 43 - DNA, 3789 bp, unidentified
  source 1..3789: mol_type = other DNA
atgaagaatttaaaggaatttcacaacctgtatccagtacagaaaactcttcgttttaagttggagcctatcggaaaaacagaggagttcattgaacgtgcacaaatcttagagaatgatgagcgccgcgctgatgaatatctcaaggttaaggagtatatagaccgatatcatcgtgagttcattgagaacgctttaagtcaacctctacttaaggtggaatcggaagggaagcaggattctcttgaagattttgccgactgctacaacaatgacaatagcgaaaaacgcagtgataatcttgaaaaaattcaagacaaacttagaacgcaaattgtcaaaggattcagtaaattacccgcttttgcacgaatagctaaaaaggagcttattaaggaggatttacccaagtttctaaaagacaaaaacgaaaaagaaattgtttcgcattttgatgagttcacaacctatttcactggtttccatcagaatcgcatgaacatgtatactgccgaagcaaagtcgacttctatagcttttaggcttattaaccagaaccttgtaaaatttgttgacaatagcaatatccttgaaaaggttgttcctgtacttggaaaagacattattgcacaacttgataaagattttgaaccgttcctcaacgttgattctgctcttgatttgtttaaaattgacaattacaatgaagtgcttacacaattgcaaattgagctatacaacgcgattataggtggaagagtggatgaggggaacaaagttgagattaaaggattgaaccagtatatcaacgagtttaatcaaacgcacgaaaagtcactaaggattccaaaactcaaaccattgtttaaacaaatattgagtgaaaatgtgggtgtttcatttagaatggagcaattcaccgatgccagccaagtacaaaccgccataaaagaagaatacatcaagttggagtctagtgtttttgacaagctaaaagaaatgattaagagtttgccaacattcaacttaaatggtatttatctagccaatgatttggggcttaccgacatatgccaacgttattatggtgcttgggacaaattgaataatgcccttgtcgctgaatttgacgctgttgtgcctcgcaagaaaacacagtcacaggaaaaacgtgacaaccaagtgaagaagtaccttaaaagtgtcaagagcatatctttaggcaaaatcgacagcctcttggctgacgtaacagagaagtcaattgttgactatttcaccaacctgggtgctatcgacaatgaaaccacgcagcgtgagaacttgtttgcactcattcaaaaccgatatatttctttaaaggaagttcttgattgccctacaccgtccgacgaactcttgcgcaagaatattgaaggcatcaaggatttacttgatgctatcaaagacttacaacgatttatcaaaccgctgtgcggttgcggtgaggaacttgataaagatgagatgttctatagcgatttttctcctctttatgaaacgcttgacgacatcattactcctctatacaacaaggtgagaagctatctgacaaagaagccttacaaacttgacaagttcaagctgaatttcgaaactccgactttattgcaaagttggccaaattatcaagcatattcttgtgctatttttaaagaagatgataatcactattatctagcaattcttgataagaataatcgaagctgtcttaatactatagtaccaccaatatcaaaaaacgatatcattggattagttaagcacttacaaggtggtgacatgggaaagaacgttcagaacttaatgagaatagatggcaaaacaagaaaagtcaatggtcgtaaagagacttctggcccaaatgcaggacaaaacatacgtcttgaggaatcaaaaaagacatatttgccacatgaaattaatgaaataagaattgaaaaatctttttcattaaatagcccaaattataggagagaatgcctcaacaagtatattgacttttataaaccacttgtagaagagtattattctgaatttgattttgaattcaaagaagcatctgaatatagagatttctctcagtttaccaatcacattaatcagcagtcttaccaattaaagattattcctttttcgaaaaagtatctaaaaactcttgttgataatggtcaagtatttctttttagaatactaaacaaagacttctctccttattctaaaggacgtcctaatttgcacacgatttactggaagatgctctttgatgacaacaacctcaaggatgtaatctacaagcttaacggcaaagccgagatgtttttccgcaggagctctatcacgaatccagtaatccatgctgccaacaaggagattgccaacaagagcgcttataacaagcagcacaaagcggtgagcaagtttgattatgatataatcaaggatcgtcgcttcactcgcaaccaatatgagttccatgttccaataaccatgaacttcaaatcggcaggaagtgttcgtttcaatcaagaagtgttgtctttcatcaaagagaaaggcatcaagcatattattgggattgatagaggcgagcgtcatcttctttacttaacgatgattaacatgaaaggagagattgtggagcagttctcgcttaatgacgtggcaagcaatcctaataatcctgaatataagcaagattacaatgagttgctttcaatcaaggaaggcgaccgactgagcgcgcgtcgtaactggtcaactatcgagaacatcaaggagctgaaatcaggatatctaagccagattgttcatctcttgtcaaagatgatgatagagaatgatgccatcttggttcttgagaaccttaatacaggattcatgagaggacgtcaaaaggttgaaaaatcggtatatctcaaatttgagaaaatgcttattgacaagctcaattatgtggtagacaaaacagctgcccctaatgagcctagtggagcattgaaagcattgcaacttaccgacacttacgacaacttcaacaagtatcaaaagggcaatgtgcgccagtgcggttttgttttctacattccagcatggaacaccagcaagaccgaccctgttactggctacgtaaacctatttgacacacgactgtcaacaattggtgagattaagtctttcttcagcaaatttgaccgcatcaagtataattctaaaaatgacgcttttgaattcactttcgattacaacaactttactacaagagcagaaggcactcgcacttgctggactataagctcacaaggagagcgcatttttactcatcgcagcaaagagcagaacaatcagtttgtctctgaaacagttcacccaacacaaatctttaaggatgtgttcaaaatggctggttgtgagattaacggcaatctgaaagaaggaattgcttcaatcgaaagtctagaacctttaaagcagctattgcatgcttttaagcttgtgattcaaatgagaaacagcattactggaaccgaagttgacttcttgctatctcctgctatagatgctaaaggcacgaacttcgattctcgaaaaggcattagtactttgcccgaaaatgccgatgctaatggcgcttataacatagctcgaaaaggcttgatgattgttgagcaaatccaaaatgccgatgatattgctaatattaaatattcagtaagcaacaatgactggctcaagtttgcgcaaggataa

SEQ ID NO: 44 - DNA, 3822 bp, unidentified
  source 1..3822: mol_type = other DNA
ctgtgctcgatttttgcacacatggccattaattttgcgcgtgagataaaaaagtattatctttgtatcataaacatcaaaaaaatattgaacatggaatgcttaaaagatttttacaaccagtattcagtccaaaagactctaaggttcaagctggaacctgttggaaagaccgaggaattcattgaacgagcgcaggtcttagagaatgatgaacgtcgagcagccgaatacaagaaagttaaggaccttatcgacaactaccaccgttggtttattgagcaagcacttagtgcccctttattgaaggtagacagcactggcgacaacgattctttggaggattttcaagattgttacaacaacgacacgagtgagaaacgcagtgataatcttgagaaaattcaaggtaaattgaggagccaaatcgtcaagggatttagtaagcatccagcctttaaacacatcgacaagaaggaactcatcactaccgatttaaaacaattcctcaccgaccctaacgagattgatattgtttcacattttgccaatttcactacctatttcactggatttcatcaaaaccgaatgaacatgtattcggtcgaggctaaatcaacctcaatttcatttaggctgattaaccaaaatcttgtgaaatgcgttgacaacagcaagattcttgaaaaagtcaaaccagcattaggtgctgatatcttctcgaaactcaatcacgattttgagccattccttaatgtagttgatgctcttgacttgttcaaggtagagaactacaatgaagtcataacacaaccccaaattgaactctacaacgccatcattggcggacgtgttgacaatgacagcaaggttgagattaaaggacttaatcagtatataaatgagtataatcaaacccattccaagcaagagcgtttgccaaaactcaaaccccttttcaagcaaatcctgagcgagcgtgagggcgtttcatttagaatagaacagtttgaaaaagccaaccaagtccaagatgcaattaatgaagcctacaatgatctccatgctaatgtctttacaaaactcaaggaccttctcctgaatttaagcagttttgaccttgatggagtgtttgttgccaacgatcagtctttaaccgacatttcgcagcggcattatggtgcatgggatacagtcaagaatgctgtggtagcctcttacgacatgaccaacccgcgcaagaaatctcagtcgcaagaaaagcgcgacgagcaagtcaagaagcatctcaagagcattaagagtctttctttggccacaatcgacaatatgcttaaagatagcactggactgtcaattgtagattatttcacaacactgggggctgtcaacaatgagaacttgcaacacgagaatctatttgcacttattgagaaccgttacaatgcagctaggtctgttcttgacagtgattcgccaagcgatgaattgttgcgaaagaacataacccaaattaaagatttgcttgattccatcaaggacttgcagcgatttatcaaacctttgtgcggtagtggtgaagagccattgaaagacgagatattctatagcgatttctcggcactttacgaatcgctcgatgacacaataacccctctttataataaggtaaggagttacttgacaaggaaaccttattctctcgacaagtttaaactgaatttcgacaactctcaattgctggatggctgggatgtaaataaggaaaaagactatctgtcaatcctattgcgcaagaatggctactattatttagccatcgccaacaagaacgacaagagcgctttgtcgcagattaatcaatgcgatatgattagcggtgattgttacgagaagcttaactacaagctattgccatctcccttcaaaatgctacctaaagtgttcttctctcgtaagggtattgaagtctataatccgtcgcaagagatactagacatctacaatgagaaaaagtttcaactgggtgacaagtttgacaaggagtcacttatcaagcttattgatttctacaagaatgcaatacctcagaatgaaagctggcaatcatttgatttctcttttgcaccatcacagtcttatgagtcaataaatgagttttatagcgtgattgaaaaccagggctataaaatcgatttcaagaaagtgccttcaagcttaatcaacttgcttattgatcaagggcttctctatgtcttcaagattgccaataaggacttctcgccccattctaagggtagacccaaccttcacaccatctattggagaatgctctttgacgagaacaatcttaagaatgtagtttacaagttgaatggtagagccgagatgttttaccgtaaaagctctattcagaaccctgtcatccacaaggctcaccacgatataaaaaacaagagtgagtacaacaagcttcacaagccttcaagcaagtttgactacgatatcatcaaagaccgccgtttcacccgtaaccaatatgagttccatgtgcccatcactatgaatttcaaaccagcaggtagtgggcagttcaatcgtgacgtgctcaaattcattaaggctaaaggcatcaagcacatcattggcatcgaccgcggtgagcgtcatctgctttatctcaccatgattgacttgaaaggtcgcattgttgagcagttctcgcttaatagtgttgccagcaaccctaataatcccgacttcaagcaggattataacacaatgcttgctatcaaagagggcgaccgcctcaacgcacgtcgcaactggtctactatcgagaatatcaaagagctcaagcaaggctatctaagtcaaatagttcatctgctctcgaaaatgatgattgaaaatgatgctattctcgtgcttgagaacctcaactcgggatttatgcgtggtaggcaaaaagtagaaaaatcggtctatctcaagtttgagaaaatgcttatagacaagctcaactatgttgttgacaagggcactgacctcaatgaaccatgcggcgctctaaaagccctgcagcttaccgatagttatgaaaaattcaataagtttcaaaaaggcaatgtgcgccaatgcggtttcgtgttctacataccagcctggaacacaagcaagattgacccggcaacaggttttgtcaatctctttgacactcgtctatcaacaattggggaaatcaaagctttcttcagcaaatttgaccgcatctcttatgatgcttccaatgatgtctttgagttcagttttgattacaacaatttcacgtcaagggctcaaggtactcgcacgcgatggactgttaccacccgaggtgaacgcatctttactcatcgaagcaaggagaagaacaatcagtttgtttctgaattagtttcgccaaccagcctgctcaaggacgttttggaaaagactggcaccaacttgcagggaaatctcaaagaggcaatagcttcattgcaaagccttgacgaactcaagcaattgcttcatgctttcaagctcactatgcaaatgcgaaacagcgtcactggaaccgatgttgactatttgatttcaccagctatagatgctaagggtaacaacttcgattctcgtgagtgtgactccaccatgcctctaaatgccgacgccaatggggctttcaacattgctcggaaaggacttatgattgttgagcaaatccagaaggtagacgatattggcaatttaaaatatgctgtcaccaacaaggactggctaacttttgctcaaaaatga

SEQ ID NO: 45 - protein, 1226 aa, unidentified
MSNLYRNLHNFYSVQKTLRFELIPQGKTKENMEKEGILKADEHRAEIYSKVKKYCDEYHKLFIDKCLKNIRLNELNKYYELYSVVKKDEKQKEEFIKIQEKLRKQISESFRNNNEYKGLFQKDIINIYLITMYKDDKEKIKDISEFNKFTTYFSGYNKNRENMYSEEEKPTGIAYRLINENLPTFIENFKIYNKVIKFMPEIINKIHTDLMEYIQVEDIDEIFDINYYNEVLTQKGIECYNIIISGKSKSNGEKIKGLNEYINEFNQKHNEKIPKLQELYKQILSDTDTASFKFDTIESDEELLNNIESYYTKLLPVFNKINQLFAKFNKYNLDLIFINNDGTLNTISNEIYKDWSYIRNRIGERYDIEYTGKLKKDTEQYSKQKQEYMKKQKQYSLKFLNDSLRDNYLIEYISNYIEQSKIMEKMKTDFTEVQKIESRGDTKQLIKDENSIVKIKNLLDDIKFLQEFAKILVLKDRTIEKDAEFYSELMPYYNELKDIIPLYNKTRNYLTQKPYSTEKIKLNFECPTLLNGWDLNKEEANLGVILLKNEKYYLGIINPYCKKIFKIQEKDSNSENNYKKMEYKLLPGPNKMLPKVFFSKSKIDEFMPSDELLEKYNKGCHKKGKDFDINFCHELIDFYKTSLNKHKDWKKFDFKFKSTSEYNDISEFYKDVEEQGYKIEYSEYSEKYINELVDRGELYLFQIYNKDFSEYSKGRPNLHTMYWKAVFDIENIKNPVYKLNGEAEIFYRKKSLERKITHSANEPVANKNENTIKSGKPTSLFKYDLIKDKRYTVDKFQFHVPITMNFKSEKMFNINQVVNKYLKYNDDINVIGIDRGERNLLYVCVIDKNEKIVYQKSLNEIVNEYKSIKYSTNYHTLLNKKEKEREIAREDWKNIENIKELKEGYMSQVIHILVELMRKYNAIIVIEDLNKGFKNSRIKVEKQVYQKFEKMFIDKLNYLVFKDEPKESEGGVLNAYQLTNKFETFNKIGKQSGVLYYIPAWCTSKIDPTTGFINRFYIKYENLDKSKEFINKIDDISYNSSEKLFEFDIDYSKFTDRLNETRNKWTLYTNGERIYTYRNDKGEWIDKKIQLTNEFNKLFEKYSINLDNIKNEILEKANIEFFKGNNETLGFIQLFKLMVQMRNSLTGKEEDNLISPVKNSNGKFFNTNEQIEGLPKDADANGAYNIARKGLMLIEQMRNTEDDKLNKIKYNITEKEWLDYVQNRGM

SEQ ID NO: 46 - protein, 1241 aa, unidentified
MLYDNIIVNEIYGRYDMSNLYNSLHNFYPVQKTLKFELIPQGKTKENMEREGILKTDQHRAAVYKKVKKYCDEYHKVFIDRCLKDLQLKELERYYELYSLTNKDDEKKEELKKIQEKLRKQISDSFKNNSEFKGLFQKDIINSYLMAMYKEDEEKIKEISEFNKFTTYFSGYNKNRENMYSEEEKSSAISYRIINENLPTFIDNLRIYNKIIKLIPEIMEKIYTDLIEYIQVENINKVFNINHYNKVLTQRGIECYNIIISGKVQNEGEKIKGINEYINEFNQTHNEKIPKMQELYKQILSDTDTASFKYDVIECDRDLLDNIESYGRRILQILDGTGSLLEKINDYNLDLIFINNDGILSKVSNDIYSDWSYIRNRISDIYDEKYNGKLSKNTEKYFKQKQDYIKKQKCYSLKFLKQSLEDDRVIKYISSYIRETSLVERIRSSFIEVQNIKERSNEKNLIKDENSITKIKTLLDNIKLLQEFVKMLIPKDRTEEKEAKFYSELMTYYDELENVIPLYNKTRNYLTQKPYSTQKIKLNFECPTLLNGWDSNKEQANLGVILLKDEKYYLGIINPYCRKIFETEEQDINSENNYKKMEYKQLPGSKMLAKVFFSKSRKDEFNPSDELLKKYEKGLHKKGPNFDIQFCRELIDFYKNSLNKHEEWKKFDFKFRDTLEYNNIGEFYKEFEEQGYKIEYSEYSESYINELVNRGELYLFQIYNKDFSEYSKGNPNLHTMYWKAVFDLQNIKDPIYKLNGNAEIFYRQRSLEKRITHPANTPVNNKSEETIKAGKPQSIFKYDLIKDKRYTMDKFQFNVPITMNFKSEKLLNINGIVNKYLKYNDDIYVIGIDRGERNLLYVCVIDKNEKIVYQKSLNEIVNEYRNIKYSIDYHLLLDKKEKEREAAREDWKNIENIKELKEGYMSQVIHVLIELMRKYNAIIVIEDLNKGFKNSRIKIEKQVYQKFEKMFIEKLNYLVFKNEVEKAEGGILNAYQLTNKFESFNKIGKQSGILYYIPAWCTSKIDPVTGFINRFYIKYENLDKSKEFVNKIEDIRYNSREDLFEFDIDYGKFTDKLNDTRNKWTLCSNGERIYTHKNNTGEWIDNRIQLTKEFKKLFEEYDVDLNNIKPEILQKSNIEFFKGNNENLGFMQLFKLMVQMRNSLTGKDEDNLISPVKNRNGKFFDTKDQIEGLPKDADANGAYNIARKGLMLVKQMKDTEDENLNKIKYNITEKEWLNYLQNRGM

SEQ ID NO: 47 - DNA, 3681 bp, unidentified
  source 1..3681: mol_type = other DNA
atgtctaacctgtacaggaacctacataatttctactctgtacagaaaaccctcagatttgaattgattccccagggaaaaaccaaggaaaacatggaaaaagaaggcatactgaaggccgacgagcatcgggccgaaatctatagcaaggttaagaaatactgtgacgagtatcacaaactgttcatagataaatgccttaagaacattcggctgaatgagctcaataagtattacgagttgtactccgtggtaaaaaaagatgagaagcagaaagaagagttcattaaaatccaggaaaagctgagaaagcaaatttcagagagtttcagaaacaataacgagtataagggccttttccagaaggacatcattaacatctatctcattaccatgtacaaggacgacaaagagaagatcaaggatatcagcgagtttaacaaatttaccacttacttcagtggctacaacaaaaatagggagaatatgtattcggaggaggagaaacctaccggaatagcttatcgtctgattaacgagaacttgcccacctttatcgagaacttcaagatctataacaaggtgatcaagtttatgcctgagatcatcaacaaaatccatacagacctgatggaatatatccaggtcgaagacattgatgagatcttcgacatcaactactataacgaagtgttaacacagaaaggcatagagtgctacaatatcattatttctggcaagtcaaagtccaatggagaaaagatcaaagggctgaatgagtatatcaacgaatttaaccagaagcacaatgaaaaaatcccaaagttacaggaactgtacaaacagatacttagcgacacagatacagctagcttcaagtttgatactatagaatctgacgaggaactcctgaataatatcgaaagctactataccaaactgctccctgtttttaacaaaatcaatcagctgttcgcaaaatttaacaagtataacctggacctcattttcattaacaatgatggaactctcaacacaattagcaacgagatatacaaagattggagctacattcggaatcgaattggtgaacgatacgatattgagtataccgggaaattaaagaaagatacggagcaatacagcaaacaaaaacaggagtacatgaagaagcaaaaacagtacagccttaagttcctgaatgacagccttcgagataactacttgatagaatacatctccaactacattgagcagtctaagataatggaaaagatgaaaaccgacttcaccgaagtgcagaagattgaaagcaggggagacaccaaacagttgataaaagacgaaaattccatcgtgaaaatcaaaaatctccttgacgacattaagtttctacaggaatttgccaagatcctagtgcttaaagacagaacaatcgagaaggatgcggaattttacagtgaattaatgccgtactacaatgagctgaaagacatcataccactgtataataagacccgcaactacctcactcagaaaccttactccactgagaaaattaaactgaacttcgagtgtcctacactcctcaatgggtgggatcttaataaagaggaggctaacctgggagttattctcctgaagaacgagaagtattatttaggcatcataaacccctactgtaagaagattttcaagatccaagaaaaggatagtaactcagagaacaactataagaagatggaatacaagctcttgcccggtcccaataaaatgctgccgaaagtctttttttccaagtccaagatagatgaattcatgccatctgacgagttgttagagaaatataacaagggttgccacaagaaaggaaaagatttcgacattaacttctgccatgaactgatcgatttttataaaacctccctcaataagcacaaggattggaaaaagttcgactttaagttcaagtccacttcggaatacaacgacatctctgagttttacaaagatgttgaagaacaggggtacaaaattgagtattcagagtacagtgagaaatacattaacgaactggtggatcgcggggaactttatctgtttcaaatctacaacaaggactttagtgagtattcgaaagggcgtccaaatctgcacaccatgtactggaaagcagtgttcgatatcgagaacatcaaaaatccggtgtataagctgaacggggaagcagaaatcttctatagaaagaaatctctggagcgtaaaattacacacagtgctaatgagccagtggccaataagaacgaaaatacaatcaagtctggaaaacctacgagtcttttcaagtacgacctcataaaggataagcgctatacggtggataagtttcaatttcatgtcccaataaccatgaatttcaagtccgagaaaatgtttaacatcaatcaggtagtcaacaagtacctcaaatataacgatgacataaacgtgatcggcatcgaccgcggggagaggaatttactgtatgtctgtgtcatcgataagaatgagaagatcgtttaccaaaagtctctaaatgagattgtcaacgagtacaagtctatcaagtattcaaccaactatcacacactgctgaacaaaaaagagaaagagagagagattgcacgggaagactggaagaacattgaaaacattaaggagttgaaggaaggatatatgagccaggtgattcacatcttggtggaactgatgcggaaatacaatgccataattgtaatcgaagacctgaataaaggttttaagaattcccggatcaaggtggagaagcaggtgtatcagaagtttgagaagatgttcattgacaagctcaactatttggtgtttaaagacgaacccaaagagtccgaaggcggcgtcctaaatgcatatcagctgacaaataagttcgaaacgttcaacaaaatcggcaagcaatcaggtgtgctctactatatccccgcctggtgcacaagcaagattgatccaactacaggcttcattaacaggttctacataaagtacgagaatctagataagagcaaggagttcatcaataagatcgacgacatttcatacaattcctccgaaaaacttttcgagttcgacatcgattactcaaaatttactgaccggctaaacgagacgaggaataagtggactctttacactaatggtgagcgcatttatacttacagaaatgacaaaggagagtggattgataagaagattcagctgacaaatgagtttaacaagctgttcgagaaatatagcatcaacctggataacatcaaaaatgagattttggagaaggccaatatcgaatttttcaagggtaacaacgaaaccctggggtttattcagttgtttaaactgatggtccaaatgaggaattctctgactggaaaggaggaggataatcttattagtcccgttaagaactcaaacggcaaattcttcaataccaatgaacagatagagggcttacctaaagatgctgacgccaatggcgcttataatatcgcgcgcaaggggctcatgctgattgagcaaatgaggaatacggaagacgataagctgaacaagataaagtacaacatcactgagaaagaatggctcgactacgttcagaatcgagggatgtga

SEQ ID NO: 48 - DNA, 3726 bp, unidentified
  source 1..3726: mol_type = other DNA
atgctgtacgacaacatcattgtgaacgagatctacggcaggtacgacatgagcaatctgtacaacagcctgcacaacttctatcccgtccagaagactcttaagttcgaactgatacctcaggggaagaccaaggagaacatggagagagagggcattctgaagaccgaccagcaccgggccgcagtgtataagaaggtgaagaaatactgtgacgaataccacaaagtgttcatcgatagatgcctgaaagaccttcagctgaaagagttggagcgctattacgagctgtacagcctgaccaataaggacgacgagaagaaagaggagctgaagaagattcaggaaaaactgcgcaaacagatcagcgatagctttaagaacaatagtgagttcaagggcctgttccagaaggatatcatcaattcttatctgatggccatgtacaaggaggacgaggaaaagatcaaggagatttccgagtttaacaagttcaccacttatttttctgggtacaataaaaatcgcgagaacatgtattcagaagaggagaagtctagcgctatcagctataggatcatcaacgagaacctgcccacctttatcgacaacctgcggatctataacaaaattatcaaactgattcccgagatcatggagaagatctataccgacctgatcgagtacatccaggtggagaacatcaataaagtgttcaatattaaccactacaataaggtgctgacccagcgggggatcgaatgctacaatatcatcatcagtggaaaggtgcagaacgagggcgagaagatcaagggcatcaacgaatacattaacgaattcaaccagacccataatgaaaagatcccaaaaatgcaggaactgtacaaacagatcctgagtgatacagacaccgcttctttcaagtacgacgtgatcgagtgtgatagggacctgctggacaacatcgagtcgtatggaaggaggatcctgcagatcctggacggaacaggcagcctgctcgagaagatcaatgactataacctcgacctgatcttcattaataatgatggcatcctgtccaaagttagcaacgatatttattccgattggagctacatcagaaatcgcatttccgacatctacgatgagaagtataacggtaagctgagcaaaaacaccgaaaaatacttcaaacagaagcaggattacatcaagaaacagaagtgctacagcctgaaatttctaaagcagagcctggaggatgatagggtgatcaaatacatctcttcctacatcagggagacctcactggtggagaggatcagaagcagctttatcgaggtgcagaacattaaagagagatcaaacgaaaagaatctgatcaaggacgagaatagcatcacaaagatcaagaccctgctggacaacatcaagctgctgcaggagttcgtgaagatgctgatcccaaaggacagaaccgaggagaaggaggccaaattctactctgagctgatgacatactacgatgagctggagaacgtgatcccactgtacaataagaccagaaattacctgacacagaagccctactctactcagaagatcaagctgaactttgagtgcccaacactgctgaatggctgggacagcaataaagaacaggctaacctgggcgttatcctgctcaaggacgagaagtactatctgggcatcatcaacccatactgccggaagatcttcgagacagaggaacaggacatcaactccgagaacaactacaagaagatggaatataagcagctgcccggctcaaagatgctggccaaggtgttcttctccaagagccggaaagacgagtttaaccccagtgacgagctgctgaagaagtacgaaaagggcctccacaaaaaggggcccaacttcgatattcagttttgtagggagctgatcgatttttacaagaatagcctgaataagcacgaagaatggaagaagtttgactttaagtttcgcgacaccctggagtataacaacatcggggagttttacaaggagttcgaggagcagggctataagattgaatactctgaatatagcgaatcctacattaacgaactggtgaacaggggcgagctgtatctgttccagatctacaataaggatttttctgaatattccaagggcaaccccaatctccacaccatgtactggaaggctgtgtttgacctgcagaacatcaaggatcccatctataaactgaacggcaacgccgaaatcttttataggcagcggtcactggaaaaaagaatcacccaccccgctaacaccccagtgaacaacaaaagcgaggagaccatcaaagccggaaagccccagtctatctttaagtatgacctcatcaaggataagcggtacaccatggacaagttccagttcaatgtgcccatcaccatgaatttcaagtccgagaagctgctgaacatcaacggcatcgtgaataagtatctgaaatacaacgacgacatctacgtgattggaatcgatagaggcgagcgcaatctgctgtatgtgtgtgttatcgacaagaacgagaaaatcgtctaccagaagagcctgaacgagatcgtgaacgaatacagaaatattaagtactccatcgactaccatctgctgctggacaagaaggaaaaggaaagggaggctgcccgggaagactggaaaaatatcgagaatatcaaggaactgaaggaaggatacatgagccaggttatccacgtgctcatcgagctgatgaggaagtacaacgctatcattgtgatcgaggacctgaataagggcttcaaaaacagccgaattaagatcgaaaaacaggtgtatcagaagttcgagaagatgtttattgaaaaactgaactacctggtgttcaagaacgaagtggaaaaggccgaaggcgggatcctgaacgcctaccagctgaccaataagtttgaatcctttaataagatcggcaagcagagcggcatcctgtactacatccctgcctggtgtaccagcaaaatcgatccagtgaccggcttcatcaacagattctacattaagtatgagaatctggacaagagcaaagagttcgtgaacaagatcgaagatattagatataatagccgggaggacctgttcgaattcgacatcgattatggcaagtttaccgacaagcttaacgacacccggaacaaatggacactgtgcagtaatggagagagaatctacacccataagaacaatacaggagagtggatcgacaacagaatccagctgaccaaagagtttaaaaagctgttcgaggagtacgacgtggacctgaacaatattaaacctgagatcctgcagaagtctaacatcgagttcttcaagggcaacaacgagaacctgggcttcatgcaactgttcaagctgatggtgcagatgcgaaatagcctcaccggcaaggacgaggataatctgattagccccgtgaagaataggaacggcaagttctttgacaccaaagaccagatcgagggactgcccaaggacgccgacgccaacggcgcctacaatattgcccggaagggcctgatgctggtgaagcagatgaaggacacagaggacgagaatctgaataaaattaaatacaacatcaccgagaaagagtggctgaactatctgcagaatagaggcatgtga

SEQ ID NO: 49 - DNA, 36 bp, unidentified
  source 1..36: mol_type = other DNA
gtttaataccttatataaatttctactattgtagat

SEQ ID NO: 50 - DNA, 35 bp, unidentified
  source 1..35: mol_type = other DNA
tttaataccttatataaatttctactattgtagat

SEQ ID NO: 51 - DNA, 36 bp, unidentified; identical to SEQ ID NO: 49
  source 1..36: mol_type = other DNA

SEQ ID NO: 52 - DNA, 35 bp, unidentified; identical to SEQ ID NO: 50
  source 1..35: mol_type = other DNA

SEQ ID NO: 53 - RNA, 36 nt, unidentified
  source 1..36: mol_type = other RNA
gtttaataccttatataaatttctactattgtagat

SEQ ID NO: 54 - RNA, 36 nt, unidentified; identical to SEQ ID NO: 53
  source 1..36: mol_type = other RNA

SEQ ID NO: 55-56 - skipped (2 entries)

SEQ ID NO: 57 - protein, 1250 aa, unidentified
MKEQFINRYSLSKTLRFSLIPVGETENNFNKNLLLKKDKQRAENYEKVKGYIDRFHKEYIESVLSKARIEKVNEYANLYWKSNKDDSDIKAMESLENDMRKQISKQLKSNARYKRLFGKELICEDLPSFLTDKDERETVECFRSFTTYFKGFNTNRENMYSSDEKSTAIAYRCINDNLPRFLDNVKSFQKVFDNLSDETITKLNTDLYNIFGRNIEDIFSVDYFEFVLAQSGIEIYNSMIGGYTCSDKTKIQGLNEYINLYNQQISKNEKSKRLPLIKPLYKQILSEKDSVSFIPEKFNSDNEVLLAIDDYYNNHIGDFDLLTELLQSLNTYNANGIFVKSGVAITDISNGAFNSWNVLRSAWNEKYEALHPVTSKTKIDKYIEKRDKVYKAIKSFSLFELQSLGNENGNEITDWYISSINESNRKIKEAYLQAQELLKSDYEKSYNKRLYKNEKATESVKNLLDTIKEFQKLIKPLNGTSKEENKDELFYGKFTSLYDSVADIDRLYDKVRNYITQKPYSKDKIKLNFDNPTFLNGWALGNEFANSAQLLRDGDNYYLAIMDKELKNNIPKKYNSPTNEEDMLQKIIYQQAANPANDIPNLLVIDGVTVKKNGRKEKTGIHAGENIILENLRNTYLPDNINRIRKEKTFSTSSENFSKDDLCEYIQYYICRVQEYYSSYNFTFKNASEYKNFPEFSDDVNSQAYQISYDNISKKQIMELVDNGYIYLFQIYNKDFSKYSKGTPNLHTLYFKMLFDERNLSNVVYKLNGEAEMFYREASIGDKEKITHYANQPIENKNPDNKKKESVFEYDIVKDKRFTKRQFSLHVPITINFKAHGQEFLNYDVRKAVKYKDDNYVIGIDRGERNLIYISVIDSNGKIVEQMSLNEIISDNGHKVDYQKLLDTKEKERDKARKNWTSVENIKELKEGYISQVVHKICELVVKYDAVIAMEDLNFGFKRGRFPVEKQVYQKFENMLISKLNLLIDKKADPTENGGLLRAYQLTNKFDGVNKAKQNGIIFYVPAWDTSKIDPATGFVNLLKPKCNTSMPEAKKLFETIDDIKYNTNTDMFEFYIDYSKFPRCNSDFKKSWTVCTNSSRILTFPNKEKNNMWDNKQIVLTDEFKSLFNEFGIDYKGNLKSSILSISNADFYRRLIKLLSLTLQMRNSITGSTLPKDDYLISPVANKNGEFYDSRNYKGTNAALPCDADANGAYNIARKALWAINVLKDTPDDMLNKAKLSITNAEWLEYTQK

SEQ ID NO: 58 - protein, 1227 aa, unidentified
MKEQFINCYPLSKTLRFSLIPVGKTEDNFNKKLLLESDKQRAENYENVKSYIDRFHKEYIKSALANARIEKINEYAALYWKNNKDDSDAKAMESLEDDIRKQISKQLTSTANFKRLFGKELICEDLPAFLTDENEKETVECFRSFTTYFNGFNTNRKNMYSSEKKSTAIAYRCVNDNLPRFLDNIKTFQKIFDNLSDETITKLNTDLYNIFGRKIEDIFSVDYFDFVLTQSGIDIYNYMIGGYTCSDGTKIQGLNECINLYNQQVAKNEKSKRLPLMKPLRKQILSEKDSVSFIPEKFNSDNEVLLAIEEYYNNHISDIDSLTELLQSLNTYNANGIFIKSGAAVSDISNAAFNSWNVLRLAWNEKYEALHPVTSTTKIDKYIEKRDKVYKSIKSFSLFELQELGAENGNEITDWYISSINECNRKIKETYLQARELLESDYEKDYDKRLYKNEKATELVKNLLDAIKEFQQLVKLLNGTGKEENKDELFYGKFTSLYDSVADIDRLYDKVRNYITQRPYSKDKIKLNFDNPQLLGGWDKNKESDYRTVILRKNDFYYLAVMDKSHSKVFVNAPEITSEDEDYYEKMEYKLLPGPNKMLPKVFFASRNIDKFQPSDRILDIRKRESFKKGATFNKSECHEFIDYFKESIKKHDDWSKFGFEFSPTESYNDISEFYREVSDQGYYISFSKISKNYIDKLVENGYLYLFKIYNKDFSKYSKGTPNLHTLYFKMLFDERNLSNVVYKLNGEAEMFYREASINDKEKITHHANQPIKNKNPDNEKKESVFEYDIVKDKRFTKRQFSLHVSVTINFKAHGQEFLNYDVRKAVKYKDDNYVIGIDRGERNLIYISVINSNGEIVEQMSLNEIIGDNGYSVDYQKLLDKKEKERDKARKNWTSVENIKELKEGYISQVVHKICELVVKYDAVIAMEDLNFGFKRGRFPVEKQVYQKFENMLISKLNLLIDKKAEPTETGGLLRAYQLTNKFDGVNKAKQNGIIFYVPAWDTSKIDPVTGFVNLLKPKYTSVREAKKLFETIDDIKYNTNTDMFEFCIDYGKFPRCNSDFKKTWTVCTNSSRILSFRNEKKNNEWDNKQIVLTDEFKSLFNEFGIDYTSDLKASILSISNADFYNRLIRLLSLTLQMRNSIIGSTLPEDDYLISPVANDRGEFYDSRNYKGSNAALPCDADANGAYNIARKALWAINVLKDTPDDMLQKAKLSITNAEWLEYTQR

SEQ ID NO: 59 - protein, 1227 aa, unidentified
MKEQFINCYPLSKTLQFSLIPVGKTDDNFNKKLLLERDKQRAENYEKVKGYIDRFHKEYIESVLVNARVEKIDEYADLYWKSNKDDSDAKAMESLENDMRKQISKQLKSNARYKRLFGKELICEDLPSFLTDKEERETVECFRSFTTYFKGLNTNRENMYSSDEKSTAISYRCINDNLPRFLDNVKSFQKVFDNLSDETITKLNTDLYNTFGRNIEDVFSVDYFEFVLAQSGIDIYNSMIGGYTCSDGTKIQGLNECINLYNKQDAKNEKSKRLPLMKPLYKQILSEKDSVSFIPEKFNSDNEVLLSIEDYYSSHIGDLDLLTELLQSLNTYNANGIFVKSGAAVSDISNGAFNSWNVLRLAWNEKYEALHPVTSKTNLDNYIEKRDKIYKAIKSFSLFELQSLGNENGNEITDWYISSSKECNSKIKEAYLQARELLKSDYEKSYNKRLSKNGKATQSIKNILDAIKDFHHLVKSLNCTGKEENKDELFYGKLTSYYDSITDIDRLYDKVRNYITQKPYSKDKIKLNFDNPQLLGGWDKNKESDYRTVLLRKDDFYYLAVMDKLHSKAFVDAPNITSKDEDYYEKMEYKLLPGPNKMLPKVFFAAKNIDTFQPSDRILDIRKRESFKKGATFNKSECHEFIDYFKNSIEKHYDWSQFGFEFTPTENYNDISEFYREISDQGYSVSFNKISKSYVDELVDNGYIYLFQIYNKDFSKYSKGTPNLHTLYFKMLFDERNLSNVVYKLNGEAEMFYREASINDKEKITHQANQPIENKNPDNEKKESTFEYDIIKDKRFTKRQFSLHVPITINFKAHGQEFLNYDVRKAVKYKDDNYVIGIDRGERNLIYISVIDSNGKIVEQMSLNEIISDNGHRVDYQKLLDTKEKERDKARKNWTSVENIKELKEGYISQVVHKICELVVKYDAVIAMEDLNFGFKRGRFPVEKQVYQKFENMLISKLNLLIDKKADPTEDGGLLRAYQLTNKFDGVNKAKQNGIIFYVPAWDTSKIDPVTGFVNLLKPKYTSVSEAKKLFETIDDIKYNANTDMFEFCIDYGKFPRCNSDYKNTWTVCTNSSRILTCRNKEKNNMWDNKQIVLTDEFKSLFGEFGIDYKGNLKTSILSISNADFYRRLIKLLSLTLQMRNSITGSTLPEDDYLISPVANDRGEFYDSRNYKGMNAALPCDADANGAYNIARKALWAINVLKSTPDDMLNKANLSITNAEWLEYTQK

SEQ ID NO: 60 - DNA, 3753 bp, unidentified
  source 1..3753: mol_type = other DNA
atgaaagagcaattcatcaaccgctactccctgtcgaaaaccctgcgcttttctttgataccagtgggggagacggagaacaatttcaataagaacttgctgctgaagaaggacaagcaacgggcggaaaactacgagaaggtgaagggatacattgaccggtttcacaaagagtatatagaatccgtgctgtcaaaggccaggatcgagaaggtgaacgagtatgccaatttgtattggaagagtaacaaagacgatagcgatatcaaggcaatggagagtttggagaacgacatgaggaaacaaatctctaagcagctgaaatccaatgcccgctataagcgactgttcgggaaagaattaatatgtgaggatctgccaagttttctgacagacaaggatgagagagaaacagtcgaatgttttcgctcattcaccacctactttaaaggatttaacaccaatagggagaatatgtattcctctgatgagaaaagtaccgccatcgcttaccgttgcatcaatgataatctaccacggttccttgacaatgtaaagagtttccagaaagtcttcgataacctctctgatgagactattactaaacttaacaccgacctgtataacatttttggacgcaatatagaggacattttttccgtggactatttcgaattcgtgctcgctcagagcggtatcgaaatttataatagcatgattggaggctacacttgttcagacaaaactaaaatccagggcctcaacgagtacatcaacttatacaatcaacagatcagcaagaatgagaagtcaaaaaggctgccccttattaaacctctgtacaagcagattctttctgaaaaggattccgttagcttcattcccgagaaatttaattcggacaacgaggtactcctggccatcgacgattattataataatcatatcggcgacttcgacctgctgacggaactcctacagagcctcaacacgtacaacgccaatgggatatttgtgaagtctggcgtggctatcactgatatctctaatggtgcctttaattcatggaacgtcctgcggtcagcttggaatgagaaatatgaggcgcttcacccagtgactagcaagaccaaaatcgacaaatacattgagaagagagacaaagtctataaagccatcaaaagctttagcctgtttgaactgcagtccctcgggaatgaaaatggcaatgagataactgactggtatatcagtagcattaacgagtccaacaggaaaatcaaggaagcgtatttgcaggcccaggaactcctgaagtctgactacgaaaaaagctacaataagaggctttacaagaacgaaaaggcaactgagagcgtcaaaaaccttttggataccataaaagagttccagaagctgattaagccattgaatggcacatcaaaggaagagaacaaagatgagctgttttatggtaaattcacgtccctatacgactccgtggctgacatagaccggctgtacgacaaggttcgaaattacatcacccagaagccctactctaaggataagatcaagctgaactttgacaaccctaccttcctgaatggctgggcactggggaacgagttcgctaatagcgctcaactgttaagagacggtgacaactactacctcgcaattatggacaaggagctgaaaaataacattccgaagaagtacaacagcccaacaaacgaggaggatatgttacagaaaatcatttaccagcaagccgccaaccctgcaaacgatattcccaatctactcgtaatagatggtgtgaccgtgaaaaagaacggccgcaaggagaagaccggcattcatgcaggcgaaaatatcattctggagaacttgaggaacacttatcttcccgataatattaaccggatacgtaaggagaaaacattttcaacgagcagtgaaaactttagcaaagacgatctgtgcgagtacatccaatactatatttgtagagttcaggagtactattcctcctataacttcacttttaagaacgcctccgagtataaaaattttcccgagtttagtgatgacgtgaattctcaggcataccagattagctatgacaacataagcaagaaacagattatggagcttgttgacaatggctatatttacctcttccagatctacaacaaagatttcagcaaatactccaaggggacaccaaacctgcacactctatatttcaagatgctgtttgatgagcgtaatctgtccaatgtcgtttacaagcttaacggcgaagctgaaatgttctacagagaagccagtattggggacaaagagaagattacccactacgctaatcaacctatagagaacaagaatcctgataacaagaagaaagagtctgtttttgagtatgacatcgttaaggacaagcgatttacgaagcgccaattcagccttcatgtccccataacaattaacttcaaggctcatggacaggaattcctcaactatgatgtgcgaaaagccgtcaagtacaaggatgataactatgtgatcggaattgaccgtggcgagagaaacttaatatacatcagtgttatcgactcgaacgggaaaatcgtggaacaaatgtcgctgaacgaaatcattagtgacaatggacacaaggtggattatcagaagctcttggatacaaaggaaaaggaaagggataaggctcgcaaaaattggacatctgtcgaaaacatcaaagaactaaaggaaggttacatctctcaggtggtgcacaagatctgcgaattagtcgttaaatacgatgctgtaattgcaatggaagacctgaattttgggtttaaacggggaagatttcctgtggaaaaacaggtgtatcagaaattcgagaacatgctcatctccaaactgaaccttctcatcgacaagaaagcggatcccactgagaatggaggattactccgggcctaccagctgacaaataagtttgacggcgtcaataaggctaagcagaacggaatcatcttctatgtacccgcctgggatacatcaaagattgacccggccacaggattcgtgaatctgttgaaaccgaaatgcaacacatctatgcctgaagccaagaagctcttcgaaacaattgacgacattaagtacaacactaataccgacatgttcgaattttacattgattactccaagttccctcgctgcaattcagatttcaaaaaatcatggaccgtatgcacaaattctagtagaatcctgaccttccctaataaggagaaaaacaacatgtgggacaataaacagatcgtgctgacagatgaattcaagtccttattcaacgagtttgggatcgattataaaggcaacctgaagtcaagcatcctcagtatttcaaatgctgatttctacaggaggctcatcaaactcctgtctttgactcttcagatgcgaaattctataaccgggtcgactctgccaaaggacgattatctaatctcccccgtcgcaaataagaacggggagttctacgacagccggaactataaaggcaccaacgcggccttgccatgtgatgccgacgccaacggtgcttacaatatcgccagaaaggcactttgggcgataaatgtgctcaaggatacccccgacgatatgttgaataaggcaaaattgtccatcaccaacgcagaatggctggagtatacccaaaaatga

SEQ ID NO: 61 - DNA, 3681 bp, unidentified
  source 1..3681: mol_type = other DNA
atgaaggaacaattcatcaattgctaccccctgagcaaaacactgagattcagcctgatccccgtcggaaaaacagaggacaatttcaacaaaaagttgttgctggaaagcgataagcagagagccgaaaactacgagaacgtgaaaagctacatcgatcgattccacaaggagtacatcaagagcgccctggccaatgctagaatcgagaagatcaatgaatacgccgctctgtactggaagaacaacaaggatgatagtgatgccaaggccatggagagcctcgaggacgacatccgcaagcagatctctaaacagctgactagcaccgccaatttcaagagactgtttgggaaggagctgatctgcgaggacctgccggcctttctgactgatgagaacgagaaggaaaccgtggaatgcttcagaagcttcaccacgtactttaacggcttcaacaccaacagaaagaatatgtactctagcgagaagaagtccacagccatcgcctatagatgcgtgaacgataatctgcctagatttctggacaatatcaagacattccagaagatcttcgacaacctgtccgatgagacaatcacaaagctgaatacagatctgtacaatatcttcggcagaaagatcgaagacatttttagcgtggactatttcgatttcgtactgacccagtccggcattgacatctacaactacatgatcggcggatacacctgcagcgacggcaccaaaattcagggcctaaatgagtgtatcaacctgtataaccagcaggtggccaagaatgagaaaagcaagcgcctgcctctgatgaagccactgagaaagcagatcctgtctgaaaaagattctgtgtctttcatccccgaaaagttcaacagcgacaacgaggtgctgctcgccatcgaagagtattacaacaaccacatctccgacatcgacagcctgaccgagctgctgcagagcctgaatacctacaacgccaacggcatcttcatcaaatcaggcgccgccgtgtcagacatcagcaacgccgcttttaacagctggaacgtgctgaggctggcctggaacgaaaagtacgaggccctgcatcctgtgaccagcaccaccaagatcgacaaatacatcgagaaaagggacaaggtgtacaagagcatcaagtccttcagcctgttcgagctgcaagagctgggagctgagaacggcaacgagatcaccgactggtacatctccagcatcaacgagtgcaacagaaaaataaaagaaacctacctgcaggccagagagctgctggagagcgactatgagaaggactatgataaacggctgtacaaaaacgaaaaggccacagagctggtgaagaatctgctggacgccatcaaggaatttcagcaactggtgaagctcctgaacggtacaggcaaggaggaaaacaaggatgagctcttttacggcaagttcacatctctctacgacagcgttgccgatatcgatagactttacgacaaagtgcggaactacattacacagcggccttactctaaggacaaaatcaagctgaacttcgacaacccccagttgctgggcggatgggataaaaacaaggaaagcgactacagaaccgtgatcctgaggaagaacgacttttattacctggctgtgatggacaaaagccacagcaaggtgttcgtgaacgcccctgagatcaccagcgaagatgaggactactacgagaagatggaatataagctgctgccaggccccaataagatgctgcctaaggtgttcttcgcctcccggaatatcgacaagttccagcctagcgaccgcatcctggatattcggaagcgggaatcttttaagaagggcgccaccttcaacaagtccgaatgccacgagtttatcgactacttcaaggaatcaattaagaagcacgacgactggtccaagttcggctttgagttctctcctaccgagagctacaacgatatcagtgagttctacagagaggtgagcgatcagggctactacatcagcttcagcaagatcagtaagaactacatcgacaaacttgtggagaatggctacctgtacctgtttaaaatctacaacaaggacttcagcaaatactccaagggcacacctaacctgcataccctgtacttcaagatgctgttcgacgagcggaacctcagcaacgtggtctacaaactgaacggagaggccgagatgttctacagagaagctagcattaacgacaaggaaaagatcacccaccacgccaaccagcctatcaagaacaagaatcctgataacgagaaaaaggaaagcgtgtttgagtacgacatcgtgaaggataagagattcaccaagcggcagttcagcctgcacgtgtctgtcacaatcaatttcaaagcccacggacaggagttcctgaactacgacgtgcggaaggctgtgaagtacaaggacgacaactacgtgatcggcatcgatagaggcgagagaaacctgatctacatcagcgttatcaacagcaacggcgagatcgtggaacagatgagcctgaacgaaatcattggcgacaacggctactctgtggactatcagaagctgctggacaagaaagagaaggaaagagataaggcgagaaagaattggacctccgtcgagaacatcaaggaactgaaggagggctacatcagccaggtggtgcacaagatatgtgaactggtggtgaagtacgatgccgtgatcgccatggaagatctgaacttcggattcaaaagaggcagattccccgtggaaaagcaagtgtaccagaagttcgaaaacatgctgatcagcaagctgaacctgctgattgacaagaaagcagagcctacagagaccggcggcctgctgcgggcctaccaactgacaaacaagttcgacggcgtgaacaaagccaagcagaacggcatcatcttctacgtgcctgcctgggacacctctaagatcgaccctgtgactggcttcgtgaacctgctgaagcccaagtatacctcggtgcgggaggccaagaagctgttcgagaccatcgacgatatcaagtacaacaccaacacagacatgttcgagttctgcatcgattacggcaaattccctagatgtaacagcgacttcaagaaaacctggacagtgtgcaccaactctagccggatcctgagcttcagaaacgaaaagaaaaacaacgagtgggacaacaagcaaatcgtcctgaccgacgaattcaagtctctgttcaacgagtttggcatcgattacacctcggacctgaaagctagcatcctgtctatcagcaacgctgacttctacaatagactgatccggctgctatctctgacactgcagatgcgtaacagcatcatcggtagcaccctgcccgaggacgactacctgatcagccctgtggccaacgaccggggagaattctacgacagcagaaactacaaaggctccaacgccgcccttccatgtgacgccgacgccaacggcgcttacaatatcgcccggaaagccctgtgggctatcaacgtgctgaaggatacccctgacgatatgctgcagaaggccaagctcagcatcaccaatgccgagtggctggaatacacccagaga

SEQ ID NO: 62 - DNA, 3681 bp, unidentified
  source 1..3681: mol_type = other DNA
atgaaggaacagttcatcaactgctaccctctgtccaaaacactgcagttcagcctgatccccgtgggcaagaccgatgataacttcaataaaaagctgctgttagagcgggacaagcagcgggccgagaactacgagaaggtgaagggctacattgacagatttcacaaagagtacatcgaaagcgtcctggtgaacgcaagagttgaaaagatcgacgagtacgccgacctgtactggaagagcaataaggacgatagcgacgccaaggccatggagagcctggaaaacgacatgcggaagcagatctctaagcaactgaagagcaacgcccggtacaaaagactgttcggcaaagagctgatctgtgaggacctgccttccttcctgaccgacaaggaagagcgcgaaaccgtggagtgttttcggagcttcaccacctactttaagggcctgaacacgaacagagagaacatgtacagcagcgacgagaagagcaccgccataagctaccgctgcatcaacgacaaccttcctagattcctggataatgtgaagtctttccagaaagtgttcgacaatctgtccgacgaaaccatcaccaagctcaacacagatctgtataacacattcggaagaaacatcgaggacgtgttctctgtggactactttgagttcgtgctcgctcagagcggcatcgacatctacaacagcatgattggcggctacacatgcagcgacggaacaaagatccagggcctgaacgaatgcatcaacctgtacaacaagcaagatgccaagaacgagaaatctaagagactgcctctgatgaagcctctgtacaagcagatcctcagcgagaaggattctgtctccttcatccctgagaagtttaacagcgacaacgaggtcctgctgagcatcgaggactactactctagccacatcggcgacctggacctgctaaccgagctgctgcaaagcctgaacacctataacgctaacggaatcttcgtgaaaagcggcgccgctgtgagtgatatcagcaacggagccttcaacagctggaacgtcctgcggctggcctggaacgaaaaatacgaggccctgcaccccgtgaccagcaagaccaatctggacaactacatcgagaagagagataagatctacaaagccatcaagagcttcagcctgtttgagctgcagagcctgggcaacgagaatggaaatgagatcaccgactggtacatcagctctagcaaggagtgtaattccaaaatcaaggaggcctacctgcaggccagagaactgttgaaaagcgattacgagaagtcctacaacaagagactgtcgaagaacggcaaggccacccagtccatcaaaaatatcctggatgccatcaaagacttccaccacctggtgaagtcactgaactgtacaggcaaggaggaaaacaaggatgagctgttctacggcaagctgaccagctattacgatagcatcaccgacatcgatagactgtacgacaaggtgcggaactacatcactcagaaaccttacagcaaggacaagatcaagctgaatttcgacaacccccagctgctcggcggatgggacaagaacaaggaaagcgattacagaaccgtgctgctgcgtaaggacgacttctactacctggcggtgatggacaaacttcattcaaaagccttcgtggacgcccctaatatcacctccaaggatgaggattactacgagaaaatggaatacaagctgctgcccggccctaacaaaatgctgccaaaggtgttcttcgccgccaagaacatcgacacatttcagcctagcgatcggatcctcgacatcagaaagcgggaaagcttcaaaaagggcgctacctttaacaagtcagaatgccacgagttcatcgactattttaagaacagcatcgagaagcactacgactggagccagttcggcttcgaattcacacctaccgagaattacaacgacatcagcgagttctaccgggagattagcgaccagggctactctgtcagctttaacaagatctccaaatcctacgtggatgagctggtggataatggctacatctatctgttccagatctacaacaaagacttcagtaaatacagcaagggcaccccaaacctgcataccctgtacttcaaaatgctgttcgacgaaagaaacctgagcaacgtggtgtacaagctgaacggcgaggccgagatgttctacagagaggcttctataaacgacaaagaaaagatcacacaccaggccaaccagcctatcgaaaacaagaaccccgacaacgagaagaaagaatctaccttcgagtacgacatcatcaaggacaagcggttcaccaagcgacagttcagcctgcacgtgcctatcaccatcaacttcaaggcccacggccaggagtttctgaactacgatgtgcggaaggccgtgaagtataaggacgacaactatgtgataggcatcgatagaggcgagagaaacctgatctacatcagcgtgatcgattctaacggcaaaatcgtggaacagatgagcctgaatgaaatcatcagcgacaatggccacagagtggactaccagaagctgctcgacaccaaggaaaaggaacgggataaggcccggaagaactggaccagcgtggaaaacatcaaggagctgaaggaaggctacatctctcaggtggtgcacaagatctgcgagctggtggtcaaatatgacgccgttatcgccatggaagatctgaacttcggcttcaagagaggcagatttcctgtggaaaaacaagtgtaccaaaagttcgagaacatgctcatttctaaactgaacctgctgatcgacaagaaggccgatcctacagaggacggtggcctgcttagagcctaccagctgacaaacaagttcgacggcgtgaacaaggctaagcagaacggcatcatcttctacgtgcccgcttgggacaccagcaagatcgaccccgtgaccggatttgtgaacctgctgaagcctaagtacacaagtgtgtctgaagctaagaagctcttcgaaacaatcgacgatatcaagtacaatgccaacaccgacatgttcgagttctgcatcgactacggcaagttcccaagatgcaatagcgattacaagaacacttggacagtgtgcaccaacagctccaggatcctgacctgtagaaacaaggaaaagaataacatgtgggataataagcagatcgttctgaccgatgagttcaagagcctgtttggcgaatttggaattgactacaagggcaatctgaaaacctccatcctgtctatcagcaacgccgacttctaccggagactgatcaagctgctgagcctgaccctgcagatgagaaacagcatcaccggcagcacattgccagaggatgactacctgatcagccccgtggccaatgacagaggagaattctacgacagccggaattacaagggcatgaacgccgctctgccgtgcgacgctgatgcgaatggcgcttacaacatcgctagaaaggccctgtgggccatcaacgtgctgaagtctacacctgacgacatgctgaacaaggccaacctctctatcactaacgctgaatggctggagtatacacagaag

SEQ ID NO: 63 - DNA, 25 bp, unidentified
  source 1..25: mol_type = other DNA
atctacaacagtagaaattattagg

SEQ ID NO: 64 - DNA, 25 bp, unidentified
  source 1..25: mol_type = other DNA
atctacaacagtagaaattattagg

SEQ ID NO: 65 - DNA, 36 bp, unidentified
  source 1..36: mol_type = other DNA
gattaataatccctaataatttctactgttgtagat

SEQ ID NO: 66 - DNA, 35 bp, unidentified
  source 1..35: mol_type = other DNA
attaataatccctaataatttctactgttgtagat

SEQ ID NO: 67 - DNA, 36 bp, unidentified
  source 1..36: mol_type = other DNA
atctacaacagtagaaattattagggattattaatc

SEQ ID NO: 68 - DNA, 36 bp, unidentified; identical to SEQ ID NO: 67
  source 1..36: mol_type = other DNA

SEQ ID NO: 69 - RNA, 25 nt, unidentified
  source 1..25: mol_type = other RNA
cctaataatttctactgttgtagat

SEQ ID NO: 70 - RNA, 36 nt, unidentified
  source 1..36: mol_type = other RNA
gattaataatccctaataatttctactgttgtagat

SEQ ID NO: 71 - RNA, 36 nt, unidentified; identical to SEQ ID NO: 70
  source 1..36: mol_type = other RNA

SEQ ID NO: 72 - protein, 1253 aa, unidentified
MKEQFINCYPLSKTLRFSLIPVGKTEDNFNKKLLLEXDKQRAENYEKVKGYIDRFHKEYIESVLXNARIEKINEYAXLYWKSNKDDSDAKAMESLENDMRKQISKQLKSNARYKRLFGKELICEDLPSFLTDKXERETVECFRSFTTYFKGFNTNRENMYSSDEKSTAIAYRCINDNLPRFLDNVKSFQKVFDNLSDETITKLNTDLYNIFGRNIEDIFSVDYFEFVLAQSGIDIYNSMIGGYTCSDGTKIQGLNECINLYNQQXAKNEKSKRLPLMKPLYKQILSEKDSVSFIPEKFNSDNEVLLAIEDYYNNHIGDXDLLTELLQSLNTYNANGIFVKSGAAVSDISNGAFNSWNVLRLAWNEKYEALHPVTSKTKIDKYIEKRDKVYKAIKSFSLFELQSLGNENGNEITDWYISSINECNRKIKEAYLQARELLKSDYEKSYNKRLYKNEKATESVKNLLDAIKEFQXLVKXLNGTGKEENKDELFYGKFTSLYDSVADIDRLYDKVRNYITQKPYSKDKIKLNFDNPQLLGGWDKNKESDYRTVLLRKXDFYYLAVMDKXHSKXFVXAPNITSXDEDYYEKMEYKLLPGPNKMLPKVFZZZZZZZZZZZZZZZZZZFAXXNIZZZZZZDTFQPSDRILDIRKRESFKKGAZTFNKSECHEFIDYFKXSIXKHYDWSXFGFEFXPTEXYNDISEFYREVSDQGYXISFXKISKXYIDELVDNGYIYLFQIYNKDFSKYSKGTPNLHTLYFKMLFDERNLSNVVYKLNGEAEMFYREASINDKEKITHXANQPIENKNPDNEKKESVFEYDIVKDKRFTKRQFSLHVPITINFKAHGQEFLNYDVRKAVKYKDDNYVIGIDRGERNLIYISVIDSNGKIVEQMSLNEIISDNGHXVDYQKLLDTKEKERDKARKNWTSVENIKELKEGYISQVVHKICELVVKYDAVIAMEDLNFGFKRGRFPVEKQVYQKFENMLISKLNLLIDKKADPTEXGGLLRAYQLTNKFDGVNKAKQNGIIFYVPAWDTSKIDPVTGFVNLLKPKYZTSVXEAKKLFETIDDIKYNTNTDMFEFCIDYGKFPRCNSDFKKTWTVCTNSSRILTFRNKEKNNMWDNKQIVLTDEFKSLFNEFGIDYKGNLKXSILSISNADFYRRLIKLLSLTLQMRNSITGSTLPEDDYLISPVANDRGEFYDSRNYKGXNAALPCDADANGAYNIARKALWAINVLKDTPDDMLNKAKLSITNAEWLEYTQK

SEQ ID NO: 73 - DNA, 3753 bp, unidentified
  source 1..3753: mol_type = other DNA
atgaaagaacagtttataaatcgttattcattatctaaaactttaagattctctttaattcccgttggggaaacagaaaataattttaataaaaatcttttgcttaaaaaagataaacaacgagcagaaaattatgaaaaggttaaaggctatattgatcgctttcacaaagaatatattgaatccgtgttgagcaaagcaagaattgaaaaagttaatgaatatgcaaatttatattggaaaagcaacaaggatgattccgatataaaggctatggaatcattagaaaatgatatgcgtaagcaaatatcaaaacagctcaaatcaaatgcacgctataaaagactgtttggaaaagaacttatatgtgaagatttaccgtcttttttaacggataaagacgagagagaaacagttgagtgctttagaagctttacaacatatttcaaaggctttaatactaatcgagaaaacatgtattcaagtgatgaaaaatcaactgcaatagcttatcgttgcataaatgacaacctaccacgctttttagataatgtaaaaagttttcaaaaagtatttgataatctttctgatgaaactatcacaaagctaaacacagatttatataatatattcggcagaaatattgaagatattttttctgttgattactttgaatttgttttagctcaatcgggcattgaaatttataattctatgattggcggatacacttgctctgacaaaactaaaatccaaggtcttaatgaatacataaatctttataaccagcagatttcaaaaaatgaaaaatcaaaaagattgccattgataaaacctttatataaacaaattttgagtgaaaaggacagcgtatcgttcattcccgagaaattcaattcagacaatgaagtgttgcttgcgattgatgattattataacaaccacattggtgattttgatttactaacagagcttttgcaatcattaaacacttataatgccaatggaatatttgtaaaatcaggtgtggccattactgatatttcaaacggtgcatttaactcatggaatgtattacgctcagcttggaatgagaaatacgaagcattgcatcccgtaacaagcaaaacaaaaattgataaatatattgaaaaacgagacaaggtatataaagcaataaaaagcttttcgctttttgagcttcaaagccttggcaacgaaaacggcaacgaaataaccgattggtatatttcctcaatcaatgaaagtaacagaaaaataaaagaagcttatttgcaggcacaggaattactgaaatccgattatgaaaaaagctacaataaaagactttataaaaatgaaaaagcaacagagtcagttaaaaacctgcttgacacaataaaggaatttcaaaagcttattaagccgttaaacggtaccagtaaggaagaaaacaaggatgaacttttttacggcaaattcacttcactttatgactcggtagcagatattgacaggctttacgataaggttagaaactatattacccaaaagccttattccaaagataaaattaaattgaattttgacaatcctactttcttaaacggttgggcattaggaaacgaatttgcaaattctgcacaattgcttagagatggtgataattactatcttgcaattatggataaagaattaaaaaacaatataccaaaaaaatacaattcaccaaccaacgaagaagatatgctgcaaaagattatttatcaacaggctgctaatccggcaaacgatattccaaatcttcttgttattgatggagtaactgtaaaaaagaacggaagaaaagaaaaaacaggaatacatgcaggtgaaaatatcatattggaaaatcttagaaacacctatcttcccgacaacataaatcgtataagaaaagaaaaaacattttcaacatcaagcgaaaacttttcaaaagatgacttgtgcgagtatatccaatattatatctgccgtgtacaagaatactattcttcatacaacttcacctttaaaaatgcctcagaatataaaaacttcccagagttttcagatgatgtaaactcacaggcatatcaaattagctatgataatatttcaaaaaagcaaattatggaacttgtagacaacggatatatctatcttttccaaatctacaataaagacttttcaaagtacagcaaaggaactcctaatttacatactctgtatttcaaaatgctttttgacgagagaaacttatcaaatgtagtttataaactcaacggtgaggcagagatgttctaccgtgaagcaagtatcggtgataaagagaaaataactcactatgccaatcaaccgatagaaaataaaaaccctgataacaagaaaaaagaaagcgtttttgagtatgatattgtaaaagacaagagatttaccaaaaggcaattttcacttcacgtgcctattacaatcaactttaaggcacacggtcaggaatttttaaattatgatgttcgcaaggcggttaaatacaaagatgataattatgttatcggcattgaccgaggagagagaaacctgatttatataagcgttattgattcaaacggtaaaatcgttgagcaaatgtcgcttaatgaaataatcagtgataacgggcacaaagttgattatcaaaagcttttggacacaaaagaaaaggaaagagataaagcaagaaagaattggacctctgttgaaaatataaaggaactcaaagaaggctatatcagtcaggttgttcacaaaatttgtgaattagtcgtcaaatatgacgctgttatcgccatggaggatttgaattttggctttaagcgtggcagattccctgttgaaaagcaagtttatcaaaaatttgaaaatatgcttatttcaaaactcaatttgcttattgataaaaaggcagacccaacagaaaacggcggacttttaagagcatatcagcttacgaataaatttgacggtgtaaataaggctaagcaaaacggtatcatcttttatgttcctgcgtgggatacaagtaaaatagacccggcaacaggttttgttaatcttttgaagccaaaatgcaacacaagcatgccggaggcgaaaaaactttttgaaacaattgatgatatcaaatataatacaaacaccgatatgtttgagttctatattgattacagcaaattcccaaggtgcaattcagacttcaaaaaatcttggactgtttgcactaattcaagcaggattttaaccttcccaaacaaagaaaaaaataatatgtgggacaataaacaaattgttcttaccgatgaatttaagtcgttatttaatgaattcggcattgattataaaggtaatcttaagagctctattttaagcatttccaatgctgatttttacaggcgattaataaagcttctttcattaacacttcaaatgagaaacagtattaccggcagcacattaccgaaagatgactatctcatctcccctgttgcaaataaaaacggtgagttctatgacagtcgtaattataaaggtacaaatgccgctttgccttgcgatgccgatgccaacggtgcatataacattgcaagaaaagcactttgggcaataaatgtattaaaagacactccggacgatatgcttaataaagctaagcttagtataactaatgccgaatggcttgaatacacgcaaaaatga

SEQ ID NO: 74 - DNA, 3684 bp, unidentified
  source 1..3684: mol_type = other DNA
atgaaagaacagtttataaattgctatccattatccaaaactttaagattttctttaatccctgttggaaaaaccgaagataatttcaataaaaagcttttgcttgaaagcgataaacaaagagcggagaattatgaaaatgtcaaaagctatattgaccgctttcataaagaatatattaaatctgcattagcaaacgcaagaattgaaaaaatcaatgaatatgcggctttatattggaaaaacaataaggatgattctgacgcaaaagctatggaatcgttagaagatgatataagaaagcaaatatccaaacaacttacatcaaccgcaaactttaaaagactgtttggaaaagagttgatatgtgaagacttaccggcttttttaacagatgaaaatgaaaaagaaacagttgaatgctttagaagctttacaacatattttaatggttttaatactaatcgaaagaatatgtattcgagtgaaaaaaagtcaactgcaatagcttatcgttgtgtaaatgacaaccttcctcgctttttagataatataaaaacctttcaaaaaatattcgataatctttctgatgaaactatcacaaaactaaacacagatttatataatatattcggcagaaaaattgaagatattttttctgttgattattttgattttgttttgactcaatcaggcattgatatttataattatatgatcggcggatatacttgctcagacggaaccaaaatccaaggtcttaatgaatgtataaatctttataaccagcaggttgccaaaaatgaaaaatcaaaaagattgccgttaatgaaaccgttacgtaagcaaatcttaagtgaaaaggacagtgtatcgttcattcccgagaaattcaattcagacaacgaagtgttgcttgcgattgaagaatattataataaccacattagtgatatcgattcgcttacagagcttttgcaatcattaaacacttataatgccaatggaatatttataaaatcaggtgctgccgtttccgatatttcaaacgctgcatttaactcatggaatgtattacgcttagcttggaatgaaaagtatgaagctttgcatcccgtaacaagcacaacaaaaatcgataaatatattgaaaagcgagacaaggtatataaatcaataaaaagcttttcgctttttgaacttcaagagcttggtgcggaaaatgggaatgaaataaccgattggtatatttcatcaatcaatgaatgtaaccgcaaaataaaagaaacttatttgcaggcacgggaattgctggaatccgattatgaaaaggactacgataaaagactttataaaaatgaaaaagcaacagagttagtaaaaaacctgcttgacgcaataaaggaatttcaacagcttgttaaactgttaaacggcacaggtaaagaagaaaacaaggacgagcttttttacggcaaattcacttcactttatgactcggtagcagatattgacaggctttacgataaggttagaaactacattactcaaagaccttattccaaagataaaataaagctgaattttgacaatccccaacttcttggcggatgggataaaaacaaagaaagcgattacagaaccgttattcttcgcaaaaatgatttttactatcttgccgttatggacaaatcacacagtaaggtttttgttaatgcacctgagataacctctgaagacgaggattattacgaaaaaatggaatataagcttttgcccggtcccaataaaatgttgccaaaggttttcttcgcctctagaaatattgacaaatttcaaccgtcagacagaatacttgatattcgcaaaagagaaagctttaaaaaaggagcgacatttaacaaatccgaatgtcatgagtttatagattattttaaggaatctattaagaagcatgatgattggtcaaaattcggatttgagttttctcctacagaaagctataacgatattagcgaattttatcgagaagtttcagatcaaggctattatattagctttagtaaaatatcaaaaaactatatcgataagcttgtagaaaacggatatctttatctttttaaaatctataataaagacttttcaaagtacagcaaaggaactccgaatttacatactttgtatttcaaaatgctttttgacgagagaaatttatcaaatgtggtatacaagctcaacggtgaagccgagatgttctaccgtgaagcaagtataaatgacaaagagaaaataactcatcatgccaatcaaccgataaaaaacaaaaatcctgataacgagaaaaaagaaagcgtttttgagtatgatattgtaaaagacaaaagatttaccaaaaggcaattttcacttcacgtgtctgttacaatcaacttcaaggcacacggtcaggaatttttgaactatgatgttcgcaaggcggttaaatataaagatgataattacgttatcggcattgaccgtggcgaaaggaatctgatttatatcagcgttatcaattcaaacggtgaaattgttgaacaaatgtcgcttaatgaaataatcggtgacaacggatacagtgttgattatcaaaagcttttggataagaaagaaaaggaaagagataaagcaagaaaaaactggacctctgttgaaaatataaaggaactgaaagaaggctacatcagccaggttgttcacaaaatctgtgaattagtcgttaaatatgatgccgttatcgctatggaggatttaaacttcggcttcaagcgcggtaggtttcctgttgaaaagcaagtttatcaaaaatttgaaaatatgcttatttccaaactcaatttgcttattgataagaaggcggaaccgaccgaaaccggcggtcttttgcgagcatatcagcttacgaataaattcgacggcgtaaataaggctaagcaaaacggtatcatcttttatgttccggcttgggatacaagtaaaatagatccggtaacgggctttgttaatcttttaaagccaaaatacacaagtgtgcgggaagctaaaaagttatttgaaacaattgatgatatcaaatataacacaaacaccgatatgtttgagttctgtattgattatggtaaattcccgagatgcaattcggatttcaaaaaaacttggactgtttgcactaattcaagcagaattttatccttccggaatgaaaaaaagaataacgagtgggacaataagcaaattgttcttaccgatgaattcaaatcgttgtttaatgaatttggcattgattatacaagtgatcttaaggcttctattttaagcatttccaatgccgatttttacaatcgattgataagacttctttcattaacacttcaaatgagaaacagtattatcggcagcacattaccggaagatgactaccttatttcgcctgttgcaaatgacagaggtgagttctatgacagtcgtaattataaaggctcaaatgccgctttgccttgcgatgccgatgcgaatggcgcatataatattgcaagaaaagcgctttgggcaataaatgttttaaaagacactccggatgatatgcttcaaaaagcaaaacttagtataactaatgccgaatggcttgaatatacacaaagatga

SEQ ID NO: 75 - DNA, 3684 bp, unidentified
  source 1..3684: mol_type = other DNA
atgaaagaacagtttataaattgctatccattatccaaaactttacagttttctttaattcccgtcggaaaaacggatgataattttaataaaaagctgttacttgaaagggataaacaaagagcggagaattacgaaaaggttaaaggttatattgaccgctttcacaaagaatatattgaatccgtactagtcaatgcaagggttgaaaaaatcgatgaatatgcggatttgtattggaaaagcaacaaggacgattccgacgcaaaggctatggaatcattagaaaatgatatgcgaaagcaaatatcaaaacagcttaaatcaaatgcacgctataaaaggctgtttggaaaagaacttatatgtgaagatttaccgtcttttttaacggataaagaagagagagaaacagttgagtgcttcagaagctttacaacgtatttcaaaggccttaatactaatcgagaaaatatgtattcaagtgatgaaaaatcaactgcaatatcttaccgttgcataaatgacaacctgccacgctttttagataatgtaaaaagttttcaaaaagtatttgataatctttctgatgaaactatcacaaagctaaacacagatttatataatacattcggcagaaatattgaagatgttttttctgttgattattttgaatttgttttggctcaatcgggcattgatatttataattctatgattggcggatatacttgctctgacggaacaaaaatccaaggtcttaatgaatgcataaatctttataacaagcaggatgcaaaaaatgaaaaatcaaaaagattgccattgatgaagccgttatataaacaaatcttgagcgaaaaggacagcgtatcgttcattcccgagaaatttaattcagacaatgaagtgttgctttcgattgaagattattatagcagccacattggcgatttggatttgctaacagagcttttgcaatcgttaaacacttataatgctaatggaatatttgtaaaatccggcgctgccgtttccgatatttcaaacggtgcatttaattcatggaacgtattacgtttagcttggaacgagaaatacgaggcattgcatcccgtaacaagcaaaacaaacctcgataattatattgaaaagcgagacaagatatataaagcaataaaaagcttttcgctttttgaacttcaaagcctcggtaacgaaaacggcaacgaaataacagattggtatatttcctcaagcaaagaatgtaacagcaaaatcaaagaagcttatttgcaggcacgggaattgctgaaatccgattatgaaaaaagctacaataaaagactttctaaaaacggaaaagcaacacagtcaattaaaaacatccttgacgcaataaaggattttcaccatctggtaaagtcgttaaactgtaccggtaaggaagaaaacaaggatgaacttttttacggcaaactcacttcgtattatgactcaataacagatattgacaggctttacgataaagttagaaactacattacccaaaagccttattccaaagataaaattaaattaaattttgacaatcctcaacttctcggtggatgggataaaaacaaagaaagcgattacagaaccgttcttcttcgcaaagatgatttttactatcttgctgttatggacaaattgcacagcaaagcttttgttgatgctcctaatataacctctaaagacgaggattattacgaaaaaatggaatataagcttttacccggtcccaataaaatgttgccaaaggttttctttgccgctaaaaacattgacacattccaaccgtcagacagaatacttgacattcgcaaaagagagagtttcaaaaaaggggcaacatttaataaatccgaatgtcatgagtttatagattattttaagaactccattgagaagcactatgattggtcgcaattcggctttgagtttactcctaccgaaaactataacgatatcagcgagttttatcgagaaatttcggatcagggttattctgtaagctttaataaaatatcaaaaagctatgttgatgaacttgtagacaacggatatatctatcttttccaaatctacaataaagacttttcaaagtacagcaaaggaactccgaatttacatactctgtatttcaaaatgctttttgatgagagaaacttatcaaatgtagtatacaagctcaacggtgaagccgagatgttttaccgtgaagcaagtataaatgacaaggaaaaaataactcatcaagccaatcaaccgatagaaaacaaaaatcctgataacgagaaaaaagaaagcacttttgagtatgacattattaaagataaaagatttaccaaaaggcaattttcgcttcacgtgcctattacaatcaactttaaggcacacggtcaggaatttttgaattatgatgttcgcaaggcggttaaatataaagatgataattatgtcatcggcattgaccgaggcgaaagaaatctgatttatatcagcgttattgattcaaacggtaaaatcgttgagcaaatgtcgcttaatgaaataatcagtgataacggacacagagttgattatcaaaagcttttggacacaaaagaaaaggaaagagataaagcaagaaaaaattggacttctgttgaaaatataaaggaactcaaagaaggctatatcagtcaagttgttcacaaaatttgtgaattagtcgtcaaatatgacgctgttattgccatggaggatttgaactttggctttaagcgtggcagattccctgttgaaaagcaagtttatcaaaaattcgaaaatatgcttatttcaaaactcaatttgcttattgataaaaaggcagacccaacagaagacggcgggcttttaagagcatatcagcttacgaataaatttgacggcgtaaataaagccaagcaaaacggcatcatcttttatgttccggcttgggacacaagcaaaatagacccggtaacaggttttgttaatcttttgaagccaaaatacacaagcgtatcggaagcaaaaaagttatttgaaacaattgatgacattaaatataatgcaaataccgatatgtttgaattttgtattgattacggtaagttcccaagatgcaattcagactacaaaaatacttggactgtttgcactaattcaagcaggattttaacttgcagaaacaaagaaaagaataatatgtgggacaataagcaaattgttcttaccgatgaattcaaatcgttgttcggcgaattcggcattgattataaaggtaatcttaaaacttcaattttaagcatttccaatgctgacttttacaggcgattgataaagcttctttcattaacgcttcaaatgagaaacagcattaccggcagcacattgccggaggatgactacctcatttcccctgttgcaaatgacagaggcgaattctatgacagccgtaattataaaggaatgaatgccgcattaccttgcgatgccgatgcaaacggcgcatataatattgcgagaaaagcactttgggcaataaatgttttaaaaagcactccggatgatatgcttaataaagcaaatctcagtataactaatgccgaatggcttgaatacacgcaaaaatga

SEQ ID NO: 76 - protein, 1325 aa, unidentified
MKNNNMLNFTNKYQLSKTLRFELKPIGKTKENIIAKNILKKDEERAESYQLMKKTIDGFHKHFIELAMQEVQKTKLSELEEFAELYNKSAEEKKKDDKFDDKFKKVQEALRKEIVKGFNSEKVKYYYSNIDKKILFTELLKNWIPNEKMITELSEWNAKTKEEKEHLVYLDKEFENFTTYFGGFHKNRENMYTDKEQSTAIAYRLIHENLPKFLDNINIYKKVKEIPVLREECKVLYKEIEEYLNVNSIDEVFELSYFNKTLTQKDIDVYNLIIGGRTLEEGKKKIQGLNEYINLYNQKQEKKNRIPKLKILYKQILSDRDSISWLPESFEDDNEKTASQKVLEAINLYYRDNLLCFQPKDKKDTENVLEETKKLLAGLSTSDLSKIYIRNDRAITEISQSLFKDYGVIKDAIKFQFIQSLTIGKSGLSKKQEEAVEKHLKQKYFSIAEIENALFTYQNETDALKELKENSHPVVDYFINHFKAKKKEETDKDFDLIANIEAKYSCIKGLLNTPYPEDKKLYQRSKEDNDIDNIKAFLDALMELLHFVKPLALSNDSTLEKDQNFYSHFEPYYEQLELLIPLYNKVRNFAAKKPYSTEKFKLNFENSHFLSGWATEYSTKGGLIIKKENDFYLLIVDKKLQKEDVDLLKRNVSSNIAYRVVYDFQKPDNKNVPRLFIRSKGTNFAPAVEKYNLPIHNVIEIYDNGFFKTEYRKVDPVKFKKSLVKLIDYFKEGFTKHDSYKHYDFGWKESNQYEDISEFYNDVVNSCYQLVDEEINYDNLLKLVDEGKLYLFQIYNKDFSPYSKGKPNMHTLYWKALFDPENLKDVVYKLNGQAEVFYRKKSIEQKNIVTHKANEPIDNKNPKAKKKQSTFEYDLIKDKRYTVDKFQFHVPITLNFKATGNDYINQDVLTYLKNNPEVNIIGLDRGERHLIYLTLINQKGEILLQESLNTIVNKKYDIETPYHTLLQNKEDERAKARENWGVIENIKELKEGYISQVVHKIAKLMVEYNAIVVMEDLNTGFKRGRFKVEKQVYQKLEKMLIDKLNYLVFKDKDPSEVGGLYHALQLTNKFESFSKIGKQSGFLFYVPAWNTSKIDPTTGFVNLFNTKYESVPKAQEFFKKFKSIKFNSAENYFEFAFDYNDFTTRAEGTKTEWTVCTYGDRIKTFRNPDKVNQWDNQEVNLTEQFEDFFGKNNLIYGDGNCIKNQIILHDKKEFFEGLLHLLKLTLQMRNSITNSEVDYLISPVKNNKGEFYDSRKADNTLPKDADANGAYHIAKKGLVLLNRLKENEVEEFEKSKKVKDGKSQWLPNKDWLDFVQRNVEDMVVV

SEQ ID NO: 77 - protein, 1275 aa, unidentified
MTMKNFSNLYQVSKTIRFELKPIGSTLENIENKSLLKNDSIRAESYQKMKETIDEFHKYFIDLALNNKKLSYLNEYIALYTQSAEAKKEDKFKAEFKKVQDNLRKEIVSSFTEGEAKAIFSVLDKKELITIELEKWKNENNLAVYLDESFKSFTTYFTGFHQNRKNMYSAEANSTAIAYRLIHENLPKFIENSKAFEKSSQIAELQPKIEKLYKEFEAYLNVNSISELFEIDYFNEVLTQKGITVYNNIIGGRTATEGKQKIQGLNEIINLYNQTKPKNERLPKLKQLYKQILSDRISLSFLPDAFTEGKQVLKAVFEFYKINLLSYKQDGVEESQNLLELIQQVVKNLGNQDVNKIYLKNDTSLTTIAQQLFGDFSVFSAALQYRYETVVNPKYTAEYQKANEAKQEKLDKEKNKFVKQDYFSIAFLQEVVADYVKTLDENLDWKQKYTPSCIADYFTTHFIAKKENEADKTFNFIANIKAKYQCIQGILEQADDYEDELKQDQKLIDNIKFFLDAILEVVHFVKPLHLKSESITEKDNAFYDVFENYYEALNVVTSLYNMVRNYVTQKPYSTEKIKLNFENAQLLNGWDANKEKDYLTTILKRDGSYFLAIMDKKHNKTFQQLTEDDENYEKMVYKLLPGVNKMLPKVFFSNKNIAFFNPSREILDNYKNNTHKKGATFNLKDCHALIDFFKDSLNKHEDWKYFDFQFSETKTYQDLSGFYREVEHQGYKINFKKVSVSQIDTLIEEGKMYLFQIYNKDFSPYAKGKPNMHTLYWKALFETQNLENVIYKLNGQAEIFFRKASIKKKNIITHKAHQPIAAKNPLTPTAKNTFAYDLIKDKRYTVDKFQFHVPITMNFKATGNSYINQDVLAYLKDNPEVNIIGLDRGERHLVYLTLIDQKGTILLQESLNVIQDEKKATPYHTLLDNKEIARDKARKNWGSIESIKELKEGYISQVVHKITKMMIEHNAIVVMEDLNFGFKRGRFKVEKQIYQKLEKMLIDKLNYLVLKDKQPHELGGLYNALQLTNKFESFQKMGKQSGFLFYVPAWNTSKIDPTTGFVNYFYTKYENVEKAKTFFSKFESILYNKTKGYFEFVVKNYSDFNPKAADTRQEWTICTHGERIETKRQKEQNNNFVSTTIQLTEQFVTFFEKVGLDLSKELKTQLIAQNEKSFFEELYHLLKLTLQMRNSESHTEIDYLISPVANEKGIFYDSRKATASLPIDADANGAYHIAKKGLWIMEQINKTNSADDLKKVKLAISNREWLQYVQQVQKK

SEQ ID NO: 78 - protein, 1275 aa, unidentified; identical to SEQ ID NO: 77

SEQ ID NO: 79 - protein, 1274 aa, unidentified
MNTTYTNLFALSKTLRFELIPQGKTLHFIQEKGLITNDNKRAESYQKMKKTIDEFHKYFIDLALKNVRLSFLEDYLDLYNQSADYKKEPKFKEELKKVQDNLRKEIVLSFSKDEAKTIFSILDKKELITEELEKWFENQEKKDLHFDDKFKTFTTYFTGFHQNRKNMYSSEPNSTAIAYRLIHENLPKFLENAKAFERIKQVPELQLKIEKIYKDFELYLNVNSIEELFELNYFNDVLTQMGIDVYNNIIGGRTETDGKPKIQGLNEIINLYNQTKSKNERLPKLKQLYKQILSDRVSLSFLPDAFTDGKQVLQAIFAFYKVNILSYTIDGQAESKNLLELIQQLLANISSFETERIHLKNDTNLTTISQQLFGDFSVFSTALNYWYETKVYPKFEAEYTKATEKKRETLEKTKAVFTKQDYFSIAFLQEIITEYSLSLDKDSELITKITPTCVADYFKNHFVAKKENETDKTFGFLANITAKYQCIQGTLENATNYNEELKQDQKLIDDIKLFLDTLLELLHFIKPLHLKSDSITEKDNAFYDLFENYYEALSLLTPLYNMVRNYVTQKPYSTEKIKLNFENAQLLNGWDVNKEADYLTTILKKEGNYFLAIMDKKHNKAFQKFPEGENNYEKMTYKLLPGVNKMLPKVFFSNKNIAYFNPSKELVENYKNETHKKGEKFNLLHCRQLIDFFKDSINKHEDWKHFDFQFSETKSYQDLSGFYREVEHQGYKINFKNIDSAYIDSLVNEGKLFLFQIYNKDFSPFSKGKPNMHTLYWKALFEDQNLKNVKYKLNGQAEIFFRKASIKPENIITHKANQSIKAKNPLTPDAKNTFDYDLIKDKRYTVDKFQFHVPITLNFKATGGSFINQNVLEYLKENPEVKIIGLDRGERHLVYLTLIDQQGNILKQESLNTITDAKIATPYHQLLDIKEKERDFARKNWGTVENIKELKEGYISQVVHKIATMMVEENAIVVMEDLNFGFKRGRFKVEKQIYQKLEKMLIDKLNYLVLKDKQPTELGGLYNALQLTNKFESFQKMGKQSGFLFYVPAWNTSKIDPTTGFVNYFFTKYENVDKAKVFFDKFQSIRYNTKANYFEFEVKKYSDFNPKAEGTLQEWTVCSYGERIETKRLKDQNNNFVSTPINLTEKIEDFLGRNNIVYGDGTCIKSQIAEKNAKEFFEGLLYWFKMTLQMRNSATGTDEDYLISPVMNAQGEFYDSRKADETLPKDADANGAYHIAKKGLMWLEQIKSFDGNDWKKLELDKSNRGWLQYIQQRK

SEQ ID NO: 80 - DNA, 3978 bp, unidentified
  source 1..3978: mol_type = other DNA
atgaagaacaacaacatgctcaacttcactaacaagtaccagttatcaaaaaccttacgattcgagctgaagccaatcggaaagactaaggagaatatcattgcgaagaatatccttaagaaggatgaggaaagggctgagtcctatcaactcatgaagaaaaccattgatggctttcataaacatttcattgagctggctatgcaagaggtacaaaaaactaaactgtctgagctggaagagttcgctgaactgtacaacaagtcagcagaggaaaagaaaaaggatgacaagtttgacgataagtttaagaaagttcaggaagccctgcgaaaggagattgttaaaggcttcaattcagagaaggtcaagtattactacagcaacatcgataaaaagatcctttttaccgaactccttaaaaactggatcccaaacgagaaaatgatcactgagctctctgaatggaacgctaaaactaaagaagagaaagagcacctcgtctaccttgacaaggaattcgagaactttactacatactttggagggtttcataagaatcgtgaaaacatgtataccgataaagaacagtccaccgctattgcctaccgcctgatacacgagaatttgccaaagttcctcgacaatatcaacatttacaagaaggtcaaagagatcccggtcctgagggaagagtgtaaagttctttacaaagagattgaggagtacttaaacgtgaattccatcgacgaggtcttcgagttgtcatatttcaataaaacactcactcagaaggacatcgatgtgtacaacttaattattggcggcagaacactggaagaaggcaagaaaaagatacaagggctcaacgagtatattaatctatacaaccagaagcaggagaaaaagaacagaatacctaagctgaagatcctttacaagcagatactgagcgatcgagatagtataagttggctgcctgagagcttcgaggatgataatgagaagactgccagccagaaagtgcttgaggccatcaatctctattacagagataacctcttatgttttcagcctaaggacaaaaaggacaccgagaacgtcctcgaggaaacaaaaaaactgctggctgggttgagcacgagtgatctgtctaagatttacatccgcaacgacagagctatcactgagatttcgcagagtctgtttaaagactatggcgtaatcaaggatgcaatcaagttccagtttatacagagtctgacaattgggaagtcagggctatccaaaaaacaggaggaggctgtggaaaaacatctgaaacagaaatacttctccattgcggaaatcgagaacgcactttttacctaccagaacgaaacagatgcactcaaagagttgaaagaaaattctcacccagtggtggactatttcatcaaccactttaaagctaagaagaaggaggagacagacaaggattttgaccttatagcgaatattgaggcaaagtattcctgcattaagggacttttaaataccccctatcccgaggacaagaaactgtatcaaaggtctaaagaggacaacgatatcgacaatatcaaagcctttctggacgccttgatggagctgctgcactttgtgaagcctctagccctcagcaatgacagtacgttggaaaaagaccagaatttctactctcacttcgagccatattacgaacagctggagttgttgatccccttgtataataaggtccggaactttgctgcaaaaaagccctactctacggagaaattcaagctgaacttcgaaaattcccactttctatcgggttgggccacagaatactccaccaaaggaggcctcatcattaaaaaggagaacgatttctacctgcttattgtggacaagaagcttcaaaaagaagatgtcgatctgctgaaacggaatgtttcttcgaacattgcttatagagtcgtctacgattttcaaaagccagacaataagaacgtgccacgcttattcatccgctcaaaaggaaccaatttcgctcccgcagtagaaaagtataacctgcccatacataacgtgatcgaaatttatgacaacggattctttaagacagagtaccgcaaagtagatccggtgaaattcaagaaatcactggttaaactgatcgactattttaaggaggggttcacaaaacatgactcctacaaacattatgactttggatggaaagaatcaaaccagtacgaggacatcagtgaattttacaacgatgttgtgaacagctgctaccagctagtagatgaagagatcaactatgacaatctgctgaaactagttgatgaaggcaaactttacctctttcagatctacaacaaggatttttccccgtatagtaagggtaaacctaatatgcacaccctgtattggaaagcactttttgaccccgagaacctcaaagatgtagtctataaactgaacgggcaggcggaggtcttctatcgaaagaagtcaatcgagcaaaagaacatcgtgacacataaggccaacgaacctattgacaataagaatcctaaggccaaaaagaagcagtccaccttcgagtatgacctgattaaggataaacggtatactgtggacaagtttcagttccacgtccctattaccttaaacttcaaagcgaccggtaacgactatataaatcaagacgtccttacctacctgaagaataatcccgaggtgaatatcattggcctggacagaggcgaacgtcacctcatatatctcaccctgataaaccagaagggggagatactcctgcaggagagcttgaacaccatagtgaataagaaatacgacatcgaaaccccctaccacacactgctacagaacaaggaggatgaacgtgccaaagccagggaaaattggggcgtcattgaaaatattaaggaactgaaggagggatatattagccaagtggtgcataaaattgccaaacttatggtggaatacaacgccatagtagtgatggaagacctgaacacagggttcaagagggggcggtttaaagtggagaagcaggtctatcagaaactcgagaagatgctgattgacaagttgaattacttagtgttcaaggacaaagacccatctgaggttggcggtctatatcacgcgctccaattgactaacaaatttgagtctttcagcaagatcggcaagcagtctggattcctcttctacgtgccagcatggaataccagcaagatcgaccctactacagggttcgttaatctgttcaacacgaagtacgaatccgtcccaaaggcacaggagttcttcaagaagttcaagtccatcaagtttaacagcgccgaaaattatttcgaattcgccttcgattacaatgactttactacgagggccgaaggaacgaaaacagaatggaccgtgtgcacctatggcgataggattaagacttttcggaatcccgataaggtaaatcaatgggataatcaagaggttaatctgaccgaacagtttgaggacttctttggtaaaaacaacctgatttacggtgatggtaactgtatcaaaaaccagatcatcttgcacgataagaaggaattttttgaaggactcctacacctgttgaaactgacactccagatgagaaacagtatcacaaattctgaggtggattacctcataagccctgtgaaaaataataaaggcgaattctacgactcccggaaagctgataatactttgcccaaggatgccgatgccaatggcgcatatcatatcgccaaaaagggactggtgttgcttaatcgcctgaaagagaatgaagttgaagagttcgagaagagcaagaaggttaaggacgggaagagccagtggctgccgaataaggactggttagactttgtgcagcggaatgtggaagatatggtggtggtgtga

SEQ ID NO: 81 - DNA, 3828 bp, unidentified
  source 1..3828: mol_type = other DNA
atgacaatgaagaactttagcaacctgtaccaggtgagcaaaaccattaggtttgagctgaagccaatcggaagcacactggagaacatcgaaaacaagtcactgctgaaaaatgatagcattagagccgagagctaccagaagatgaaagagacaattgacgagttccacaagtatttcatcgatctggctctgaacaataagaagctgagctacctgaacgagtatatcgctctctacacccagagcgccgaagccaagaaggaggacaaatttaaggccgaatttaagaaggtgcaggataacctgcggaaagaaattgtgagctccttcaccgagggtgaggctaaggccatcttcagcgtgctggacaaaaaggagctgattacaattgaactggaaaaatggaagaacgagaacaacctggccgtgtacctcgacgagagcttcaagtccttcactacatacttcacaggcttccaccagaatagaaagaacatgtacagcgcagaggccaactctacagccatcgcctaccggctgatccatgagaacctgcccaagtttatcgagaactccaaggcctttgagaagtccagccagatcgccgagctgcagccaaagatcgaaaagctgtacaaggagttcgaggcctatctgaacgtgaatagcatcagcgagctgttcgaaattgactacttcaacgaggtgctgacccagaagggcattacagtgtacaacaacatcatcgggggcaggactgccaccgaggggaaacagaagattcagggcctgaatgagattatcaatctgtataatcagacaaaacccaagaacgaaagactgccaaagctgaagcagctgtataagcagatcctgtccgacagaatcagcctgtctttcctgcctgacgccttcaccgaagggaagcaggtgttgaaagccgtgtttgagttctacaagatcaaccttctgtcttacaaacaggatggcgtggaggaaagccagaacctgctggagctgatccagcaggtggtgaagaacctgggcaaccaggacgtgaataagatctacctgaaaaacgacacctccctgactaccattgcccagcagctctttggggactttagtgtgtttagcgccgccctgcaatacaggtatgagaccgtggtgaaccccaagtacactgccgaatatcagaaggccaacgaggccaagcaggagaagctcgacaaggagaagaacaagttcgtgaaacaggactacttctccatcgccttcctgcaggaggtggtggcagattacgtgaagaccctggacgaaaacctggattggaaacagaagtacaccccatcctgcatcgccgactactttaccacccacttcatcgccaagaaagagaacgaggccgataaaacctttaactttattgccaatattaaggccaagtatcagtgcatccagggcattctggagcaggccgatgattacgaggatgagctgaagcaggaccagaagctgatcgataacatcaagtttttcctggacgctatactggaggtggtgcacttcgtgaagcctctgcacctgaagtctgagtctatcactgagaaggataatgccttttacgacgtgtttgagaattactacgaggcactgaatgtggtgacctcactgtacaatatggtgagaaattacgtgactcagaagccttacagcacagagaagattaagctgaactttgaaaacgcccagctgctgaacggctgggacgctaataaggagaaggattacttgaccactattctgaagcgggatggaagttatttcctggctattatggataaaaagcacaataagaccttccagcagctgacagaggacgacgagaactacgagaagatggtctataagctgctgcccggcgtgaacaagatgctgcccaaggtgtttttctctaataaaaacatcgccttctttaaccccagcagagagatcctggacaattataagaacaacacccacaagaagggcgccacatttaacctgaaagactgtcatgccctgattgacttcttcaaggactccctgaacaagcacgaggactggaagtacttcgacttccagttctctgagacaaagacctaccaggacctgtccggcttttaccgcgaagtggaacaccagggctacaaaatcaattttaaaaaggtgagcgtgtcccagatcgacaccttgatcgaagagggaaaaatgtatctgttccagatctacaacaaggacttcagtccttacgcaaagggcaaaccaaacatgcacacactgtactggaaggcactgtttgaaacccagaacctggagaacgtgatctacaagctgaacggccaggccgagatcttttttcgcaaggcctccatcaagaagaagaacatcattacccacaaagcacatcagcccatcgccgccaagaatccactgaccccaaccgccaagaacaccttcgcctacgacctgatcaaggacaagagatatacagtggacaagtttcagtttcatgtgcccatcaccatgaacttcaaggccactggcaatagctacattaaccaggacgtgctcgcctatctgaaggataatcctgaagtgaatatcattggcctggataggggcgagcgccaccttgtgtatctgaccctgatcgaccagaaaggaaccatcctgctgcaggaaagcctgaacgtgattcaggacgagaaaaaagccacaccctaccacaccctgctggacaacaaggagattgccagggacaaggcccgcaagaactgggggtccatcgagtccattaaggaactcaaggaggggtacatctcacaggtggtgcataaaattaccaaaatgatgattgagcacaacgccatcgtggtgatggaggacctgaatttcggcttcaaacgcggaaggtttaaggtggagaagcagatttatcagaagctggagaaaatgctgatcgacaagctgaactacctggtgctgaaggacaagcagccccacgagctgggagggctctataacgctctgcagctgaccaacaagttcgagtcattccagaaaatgggaaaacagagcggcttcctgttctatgtgcccgcctggaacaccagcaagatcgaccctaccaccggtttcgtgaactatttttacactaaatacgagaatgttgagaaggctaagacgtttttctctaaattcgagagcattctgtataataagacaaagggatattttgagtttgtggtgaagaattattccgacttcaaccccaaggcagctgacaccagacaggagtggaccatttgcacccacggggaaagaatcgaaaccaaaagacagaaggaacagaacaataatttcgtgagcactacaatccagctgaccgagcagttcgtcacttttttcgagaaggtgggactggacctcagcaaagagctgaagacccagctgattgcccaaaatgagaagagcttttttgaggagctgtatcacctgctgaaactgaccctgcagatgagaaacagcgagtctcacactgagattgattacctgatctcccccgtggctaacgagaaaggaattttttacgactcccggaaggccaccgcctcgctgcccatcgacgctgacgccaacggggcttaccacatcgctaagaagggcctgtggatcatggagcaaattaacaaaaccaactccgctgacgatctgaaaaaggtcaagctggcaatctccaacagagagtggctgcagtacgtgcaacaggtgcagaaaaagtga

SEQ ID NO: 82 - DNA, 3858 bp, unidentified
  source 1..3858: mol_type = other DNA
ctgattattatcttgaacctgttcaagatgacagccctgctgcagaacttcaccaaccagtatcagctctccaagaccctgaggttcgagctgatcccccagggcaagacttttgattttatccaggagaagggcctgctgaaccaggacaaacgcagagccgagagctaccaggagatgaaaaagaccatcgacaaatttcacaaatacttcatcgacctggctctctccaacgtgaaactgacccacctggatgcttacctggagctctacaatacctccgccgagaccaaaaaggagagcaagttcaaggacgacctgaagaaagtgcaggataacctgaggaaggaaatcgtgaaaagtttcagcgagggggaggccaagtctatctttgccatcctggacaaaaaggagctgatcactgtggagctggagaagtggtttgagagcaatgagcaggaggaaatctattttgacgataaattcaaaacgtttaccacctactttaccggctttcaccagaacagaaagaacatgtattctgtggaagccaactccaccgccatagcctacagactgatccacgagaatctgcctaaattcctggaaaatgctaaggcattcgagaaaattaaacaggtcccagagctgcagcctaagatagctaagatttacaaggagtttgaatcctacctgaatgtgaattctatcgacgagctgtttgagctggactacttcaatgacgtgctgacacagatgggcatcgacgtgtacaacaatatcatcggcggcagaaccgagagcgacggcaagagcaagatccaaggcctgaatgagatcatcaatctgtataatcagacaaaagagaagaatcagagactgccaaaactgaagcagctgtacaaacagattctgtctgaccgtatctctctgtccttcctgccagatgccttcactgacggcaagcaggtgctgaaggccatcttcgacttttacaagatcaacctgctgagttacacaattgaaggacaggaagagagccagaatctgctgctgctgatctctcagattgtggagaatctgagcggattcgataaccagaaaatgtacctgagaaacgacacccatctgacaaccatctcccagcagctgttcggcgacttcagcgttttcagcaccgcactgaattattggtatgagaccaaagtgaatccaaaatttgaagccgagtactcaaaggccaacgagaagaaacgcgaggccctggacaagaccaaggccaactttacaaagcaggactatttcagtatcgccttcctgcaggaagtgctggcaaactacgtgctgacactggataaaaccagcgacgtggtgcagaagttcacccccacctgtgtggccgactacttcaataatcacttcgtggccaaaaaggagaatgagaccgacaagacattcgacctgatcgccaatattacagccaagtaccagtgcatccagggcattctggagaatgccgacaggtacgaagacgagctcaaacaggatcagaagctgatcgacgatctgaagtttttcctggatgctatcatggagctgctccacttcattaagccactccacctgaaatctgaatccattaccgagaaggacaccgccttctatgacgtgtttgagaactattacgaagcactgagcctcctgacacctctgtacaacatggtcagaaactatgtgacccagaagccctactccaccgagaaaatcaagctgaactttgagaacgcccagctgctcaacggatgggacgctaataaggaggccgactacctgacaaccattctgaagaaggatggcaattacttcctggctatcatggataagaagcacaataaggccttccagaaattccctgaaggaaccgacaactacgagaagatggtgtataagctgctgcctggcgtcaacaaaatgctgcccaaggtgtttttctccaacaaaaacatcgcatacttcaacccatcaaaggagctgctggagaactacaagaaggagacccacaaaaagggcgacacctttaatctggagcactgccacgccctgattgactttttcaaagattctctgaataagcacgaggactggaaacacttcgattttcagttcagcgaaactaagagctaccaggatctgtctggattttaccgggaagtggagcaccagggctacaagattaacttcaagaatatcgacagtgagtatatcgatggcctggtgaatgagggcaagctgtacctgtttcagatctataacaaagacttttctccctatagtaaagggaagccaaacatgcacaccctctactggaaggctctgtttgaggaacagaatctgcagaacgtgatctacaaactgaacgggcaggccgagatcttctttcgcaaggccagcatcaagccaaagaatatcatcacccacaaggccaaccagcccatcaaggccaagaatcccctgacccccgaggccaagaacaccttcgagtacgatctgattaaggacaagcggttcaccgtggacaagttccagttccacgtgcctatcactatgaactttaaggccaccggcggaagctacatcaaccagactgtgctggagtacctgcagaataacccagaggtgaagatcatcggactggaccgcggagagaggcacctggtgtacctgacactcatagaccagcagggaaatatcctgaagcaggagtctctgaacaccatctccgacacaaagattgccacaccataccacaagctgctggacaacaaggaaaaagagcgcgatctggccaggaagaactggggcacagtggagaatatcaaagagctgaaggaaggatacatcagccaggtggtgcacaagattgccacaatgatggtggaggagaacgcaatcgtggtgatggaagatctgaactttggattcaagcgcggcagattcaaggtggaaaaacagatttaccagaagctggaaaagatgttgatcgacaagctgaactacctggtgctcaaaaacaagcagccccacgaactgggcggcttgtataacgccctgcagctgacaaacaaattcgagtctttccagaaaatgggcaagcagagcggctttctgttttacgtgcctgcctggaatacctcaaagatcgatcccacaacaggcttcgtgaactatttttacaccaaatatgagaatgtggagaaagccaaagcctttttcgataagttccagagcatccgcttcaacacccgggcaaactacttcgagttcgaggtgaaaaagtactctgatttcaaccctaaagccgaagacacaaagcaagagtggatgatctgcaccttcggcgagcggatcgagaccaagagacagaaggaccagaacaacaatttcgtgagtacaaccatcaacctgaccgagaaaacagaggattttttcggaaagaacaacatcgtgtacggcgacgggaactgtatcaaaaagcagatcgccgccaaggaagacaaggacttcttcgagaccctgctgtattggtttaagatgacactgcagatgagaaactcagtgacaggaaccgatgaggactacctgatcagccccgtgatgaacgccgatggcatcttctacgacagcaggaaagccgacaacaacctgccaaaggatgccgacgccaacggcgcttatcacatcgctaaaaagggactctggatactggaacagatcaataagcccaagaccacagaagaactgaaaaagatcaagctggccatttccaataaggagtggctgcagtacgtccaggaatga

SEQ ID NO: 83 - DNA, 3825 bp, unidentified
  source 1..3825: mol_type = other DNA
atgaataccacatacaccaacctgtttgctctgagcaagacactgcggttcgaactgatccctcagggcaagaccctgcactttatccaggagaagggcctgatcacaaacgacaacaagcgcgccgagtcctaccagaagatgaagaagaccattgacgagttccacaagtatttcattgacctggccctgaaaaatgtgcgcctgtcctttctcgaggactatctggacctgtacaatcagagcgccgattacaaaaaggagcccaagttcaaggaggaactgaagaaagtccaggacaacctgagaaaggagattgtgctgagcttcagtaaggatgaggcaaagacaatcttctccattctggataagaaagagctgataaccgaggaactggagaagtggttcgaaaaccaggagaaaaaggacctgcacttcgacgacaagttcaaaacattcactacctacttcaccgggttccaccagaatcggaagaacatgtattcttcagaacccaattccaccgccatcgcctaccggttgatccacgaaaacctgccaaaatttctggaaaacgctaaggccttcgaacgcattaagcaggtgcctgagctgcagctgaaaatcgaaaagatctacaaggatttcgagctgtatctgaatgtcaactctatcgaggaactgttcgagctgaattacttcaatgacgtgctgacccagatgggaatcgacgtgtataacaatatcatcggcgggcggacagaaacagatggcaagccaaaaatccagggactgaacgagatcatcaacctgtacaaccagaccaagtccaaaaacgagagactgcccaagctgaagcagctgtataaacagatcctgagcgaccgggtgtccctgtcatttctgcctgacgccttcacagacggaaaacaggtgctgcaggccatcttcgccttctataaagtgaacattctgtcctatacgatcgacggccaggccgagagcaagaatctgctggagctgattcagcagctcctggccaacatctcttccttcgagacagagcggatccacctgaagaacgacaccaatctgacaaccatctcccagcagctgttcggagacttttctgtgttcagcacagccctgaactactggtacgaaaccaaagtgtaccccaagttcgaagcagagtataccaaggccaccgagaagaagagggaaacgctggagaagaccaaagccgtgtttaccaagcaggattacttttctattgcctttctgcaggaaatcattactgagtatagtctgtcactggataaggactcagagctgatcactaaaatcacccccacatgtgtggccgactacttcaaaaatcacttcgtggccaagaaggagaacgagaccgataaaaccttcgggttcctggctaacatcacagccaagtaccagtgcatccagggtactctggaaaatgccacaaactataacgaggagctgaagcaggatcagaagctgattgatgacatcaagctgttcctggataccctgctggaactgctgcacttcatcaagccactgcacctcaagagcgactccatcactgaaaaagacaacgcattttacgacctgttcgagaattactacgaggcactgtctctgctgacccccctgtacaacatggtcagaaattacgtgacacagaagccatatagcaccgagaaaattaagctgaatttcgaaaacgcccagctgctgaacggatgggacgttaacaaggaggccgattacctcaccaccatcctgaagaaggagggaaactactttctggccattatggataagaaacacaacaaggcttttcagaagtttcccgagggcgagaacaactacgagaagatgacctataagctgctgccaggcgtgaacaagatgctgcccaaggtgtttttcagcaacaagaatatcgcatacttcaatccttccaaggagctggtggagaattataagaacgagacccataagaaaggcgagaaatttaacctgctgcattgcaggcagctgatcgatttctttaaggactcaatcaacaagcatgaggattggaaacactttgatttccagttcagcgagaccaaaagctaccaggatctgagcggcttttaccgggaggtggagcatcagggctataaaattaacttcaaaaacatcgacagtgcctatatcgacagcctggtgaatgaggggaagctgtttctgttccagatctataacaaggacttttctccattctctaaggggaagccaaatatgcacaccctgtactggaaagccctgtttgaggaccagaatctgaagaacgtgaagtacaagctgaacgggcaggctgagatctttttcagaaaggccagcatcaaaccggagaacatcatcactcacaaggcaaaccagtctatcaaagcaaagaatcccctgacccctgacgccaaaaatactttcgattacgacctgatcaaggataagaggtacacagtggacaaattccagttccacgtgcctatcaccctgaactttaaggccaccgggggatcttttatcaaccagaatgtgctggaatacctgaaagagaaccctgaggtcaagattatcggactggacaggggcgagcgccacctcgtgtatctgaccctgatcgaccagcagggtaatattctgaagcaggagtccctgaacactatcactgatgcaaagatcgccaccccttatcaccagctcctggacatcaaggagaaggagcgggactttgccaggaagaattggggcaccgtggagaacatcaaggagctgaaagagggatatatctcacaggtggtgcataaaatcgctaccatgatggtggaggagaacgcaatcgtggtcatggaggacctgaactttggcttcaagcgcggaagattcaaggtggaaaagcagatctaccagaagctcgaaaagatgctgatcgacaaactgaattacctggttctgaaagacaagcagcccaccgagctcggcgggctgtacaacgccctgcagctgacaaacaagtttgagagcttccagaagatgggaaagcagagtggcttcctgttctacgtgcctgcttggaacaccagcaaaattgatcccacaaccggcttcgtgaactactttttcacaaaatatgagaatgtggacaaggccaaggtgttcttcgacaagtttcagtctatcagatacaatacaaaggccaactacttcgagtttgaggtgaagaaatattccgacttcaaccctaaggccgaagggaccctgcaggagtggaccgtctgtagctacggcgaacgcattgagaccaaacggctgaaggaccagaataacaacttcgtgtccacacctatcaacctgaccgagaaaatcgaggacttcctgggcaggaacaacatcgtgtacggcgacggcacatgcatcaaaagccagattgcagagaagaatgcaaaggagttctttgaaggactgctgtactggttcaaaatgactctgcagatgagaaacagcgccaccggaacagacgaggattacctgatttctccggtgatgaatgcccagggcgagttctacgactccaggaaggccgacgaaaccctgcctaaggatgccgacgctaatggcgcttaccacatcgccaagaaaggactgatgtggctggaacagatcaagagcttcgacggaaatgactggaagaagctggagctggacaaaagcaataggggatggctgcagtacatccagcagaggaagtga

SEQ ID NO: 84 - DNA, 36 bp, unidentified
  source 1..36: mol_type = other DNA
ggctacaaaaccttttaaatttctactattgtagat

SEQ ID NO: 85 - DNA, 35 bp, unidentified
  source 1..35: mol_type = other DNA
gctacaaaaccttttaaatttctactattgtagat

SEQ ID NO: 86 - DNA, 36 bp, unidentified
  source 1..36: mol_type = other DNA
atctacaatagtagaaatttagtttgtctttaaaac

SEQ ID NO: 87 - DNA, 36 bp, unidentified; identical to SEQ ID NO: 86
  source 1..36: mol_type = other DNA

SEQ ID NO: 88 - DNA, 36 bp, unidentified
  source 1..36: mol_type = other DNA
gtttttaagaccaattaaatttctactattgtagat

SEQ ID NO: 89 - DNA, 36 bp, unidentified; identical to SEQ ID NO: 88
  source 1..36: mol_type = other DNA

SEQ ID NO: 90 - DNA, 36 bp, unidentified
  source 1..36: mol_type = other DNA
atctacaatagtagaaatttaaaaggtcttgaaaac

SEQ ID NO: 91 - DNA, 36 bp, unidentified; identical to SEQ ID NO: 90
  source 1..36: mol_type = other DNA

SEQ ID NO: 92 - RNA, 36 nt, unidentified
  source 1..36: mol_type = other RNA
ggctacaaaaccttttaaatttctactattgtagat

SEQ ID NO: 93 - RNA, 36 nt, unidentified
  source 1..36: mol_type = other RNA
gttttaaagacaaactaaatttctactattgtagat

SEQ ID NO: 94 - RNA, 36 nt, unidentified
  source 1..36: mol_type = other RNA
gtttttaagaccaattaaatttctactattgtagat

SEQ ID NO: 95 - RNA, 36 nt, unidentified
  source 1..36: mol_type = other RNA
gttttcaagaccttttaaatttctactattgtagat

SEQ ID NO: 96-99 - skipped (4 entries)

SEQ ID NO: 100 - protein, 1262 aa, unidentified
MKEIKELTGLYSLTKTIGVELKPVGKTQELIEARKLIEQDDQRAEDYKIVKDIIDRYHKDFIDKCLNCVKIKKDDLEKYVSLAENSNRDAEDFDNIKTKMRNQITEAFRKNSLFTNLFKKNLIKEYLPAFVSEEEKSVVNKFSKFTTYFDAFNDNRKNLYSGDAKSGTIAYRLIHENLPMFLDNIASFNTISEIGVNEYFSGIEAEFTDTLDGKHLVDFFQVDYFNNTLTQKKIDNYNYVVGAVNKAVNLYKQQHKNVRIPLLKTLHKMILSDRVTPSWLPERFECDEEMLTAIKAAYESLKEVLVGDDDDSLRNLLLNIDNFDLEHIYIAKDSGLTSISQQIFGYYDTYTLAIKDQLQRENPNLYDERIDKLYKKEGSFSIAYLNRLVDTKEHITINEYYRLLGSYCREEGKRKDDFFKQIDGAYCAISHLFWGKHGEIAQSDSDIELIQKLFDDYKGLQRFIKPLLGHGDEADKDNEFDAKLRKVWDELDIITPLYDKVRNWLSRKIYNPEKIKLCFENNGKLLSGWSDNQTKSDNGTQYGGYIFRKKNEIGEYDFYLGISADAKLFRRDENICYEDGMYERFDYYHLTPNTLLGKSYIGNYGEDSKAVLSAFNAAITKLQLEKKLVPKDNEKVPTYLKRLKQNYANFYQILMNDDNVVDAYKSMKQHIFATLTSLIRVPAAIELATQTDLDIDELIDEILNLSSESFGYFPVATAAIEEANKREKKPLFLFKMSNKDLSYAAKSSEGLRKSRGTENLHTMYLKALLGMTQNVFSIGSGMVFFRHKTKGLAETTARHKANEFVANKNKLNDKKKSIFAYEIVKNKRYTVDKYLFKLSVKLNYSQPNNNKIDVNSEVREIISNGGIKHIIGIDRGERNLLYLSLIDLKGNIVMQKSLNILKNEHNVKGTDYKGLLTEREGERQDARRNWKKIANIKDLKRGYLSQVVHIISKMMVEYNAIVVLEDLNPGFIRGRQKIERNVYEQFERMLIDKLNFYVDKHKDANETGGLLHALQLTSEFENFKKSEHQNGCLFYIPAWNTSKIDPATGFANLFDTRYTNAVEAQKFFSKFDEIRYNEEKDWFEFEFDYDKFTQKAHGTRTKWTLCTYGMRLRSFKNPAKQYNWDSEVVALTDEFKRILGKAGIDIHENLKDAICNLEGKKDLEPLMQFMKLLLQLRNSRKNPEEDYILSPVADENGIFYDSRSCGDTLPKNADANGAYNIARKGLMLIEQIKNTEDLDTIKFDISSKAWLNFAQQKPYKNG

SEQ ID NO: 101 - protein, 1276 aa, unidentified
MKEIKELTGLYSLTKTIGVELKPVGKTQELIEAKKLIEQDDQRAEDYKIVKDIIDRYHKDFIDKCLNCVKIKKDDLEKYVSLAENSNRDAEDFDNIKTKMRNQITESFKKNPLFVGLFKKELITNYLPNFVSEEERVVVNKFSKFTTYFDAFNDNRKNLYSGDAKSGTIAYRLIHENLPMFLDNIASFNKISETGVNKYFSDIENEFTAILYEMHLSDLFQIDYFNNTLTQKKIDNYNYIVGAVNKAVNLYKQQHKTVRVPLLKTLHKMILSERVTPSWLPERFESDEEMLTAIKETYESLKDVLVGGNDDSLRNLLLNIDNFDLEHIYIANDSGLTSISQQIFGYYDTYTLAIKDQLQRENPATKKQRENPATKKQRENPNLNDDCIDKLYKKEGSFSIAYLNRLVDTKEHITINEYYRLLGSYWREEGKRKDDFFKQIDGAYSDMLYLFSTEHGEIAQSDSDTAVVQQLLEAYKGLQRFIKPLLGHGDEADKDNEFDAKLRKVWDELNIITPLYDKVRNWLSRKIYNPEKIKLYFENNGKLLSGWSDSQTEKDNGTQYGGYIFRKKNEIGEYDFYLGISTDAKLFRRDETICYEDGMYERFDYYHLKPTTLLGKSYIGNYGEDSNAVLSAFKNAVTKLHLEKKLVPKDNEKVPTYLKRLKQKYANFYQILMNDVNVVDAYKSMKQHILATLASLIRVPAAIELAAQTDLDIDELIDEIMNLPSESFGYFPVATAAIEEANKREKKPLFLFKMSNKDLSYAAKSSEGLRKSRGTENLHTMYLKALLGMTQNVFSIGSGMVFFRHKTKGLAETTARHKANEFVANKNKLNDKKKSIFAYEIVKNKRFTVDKYLFKLSVKLNYSQPNNNKIDVNSEVREIISNGGIKHIIGIDRGERNLLYLSLIDLKGNIVMQKSLNILKDDHNAKGTDYKGLLTEREGERQDARRNWKKIANIKDLKRGYLSQVVHIISKMLVEYNAIVVLEDLNPGFIRGRQKIERNVYEQFERMLIDKLNFYVDKHKDINEVGGLLHAFQLTSEFKKFKKSEYQNGCLFYIPAWKTSKIDPATGFANLLDTRYTNADKALEFFRKFDAIRYNEEKDWFEFEFDYDKFTQKAHGTRTKWILCTHGKRLRFKRNSTRVQEVVVLTDEFKKILGEAGIDIHVNLKEAICNLEGKKNLEPLMQFMKLLLQLRNSKAGTDEDYILSPVADENGIFYDSRSCGEQLPENADANGAYNIARKGLMLIRQIKEAKELDKVKFDISNKAWLNFAQQKPYKNG

SEQ ID NO: 102 - protein, 1271 aa, unidentified
MKEIKELTGLYSLTKTIGVELKPVGKTQELIEARKLIEQDDQRAEDYKIVKDIIDRYHKDFIDKCLNCVKIEKDDLEKYVSLTENSNREAVDFDNIKTKMRNQITESFKKNPLFVGLFKKELITNYLPNFVSEEERVVVNKFSKFTTYFDAFNNNRKNLYSGDAKSGTIAYRLIHENLPMFLDNIASFNKISETRVNEYFSSIEAEFTDTLNGKHLADLFQIDYFNNTLTQKKIDNYNYIVGAVNKAVNLYKQQHKNIRIPLLKKIHKMILSDRVTPSWLPERFESDEEMLTAIKAAYESLKEVLVGDDDDSLRNLLLNIDNFDLEHIYIAKDSGLTSISQQIFGYYDTYTLAIKDQLQRKNPATKKQRENPNLYDERIDKLYKKEGSFSIAYLNRLVDTKEHITINEYYRLLGSYCREGGKSNDDFFKQIDGAYSAISYLFSAEHGEIAQSDSDTAVVQKLLEAYKGLQRFIKPLLGHGDEADKDNEFDVKLRKVWDELNIITPLYDKVRNWLSRKIYNPEKIKLYFENNGKLLSGWSDSQTEYDNGTQYGGYIFRKKNEIGEYDFYLGISADAKLFRRDETICYEDGMYERLDYYNLKPNTLLGNSYIGNYGEDSNAVLSAFNDAVTKLHLEKKLVPKDNEKVPTYLKRLKQDYANFYQILMNDNNVVDAYKSMKQHILATLASLIRVPAAIELTTQTNLDIDKLIDEIINLPSESFGYFPVATAAIEEANNREKKPLFLFKMSNKDLSYAEKFSKGDRKSRGTENLHTMYLKALLGMTQNVFSIGSGMVFFRHNTEGLAETTARHKANEFIANKNKLNDKKKSIFDYEIVKNKRFTVDKYLFHLSLKLNYTQPNKFDINSKVREIIRNGGIKHIIGIDRGERNLIYLSLIDMEGNIVMQKSLNILKDDHNAKGTDYKGLLTEREGENKEARRNWKKIANIKDLKRGYLSQVVHIISKMMVEYNAIVVLEDLNPGFIRGRQKIERNVYEQFERMLIDKLNFYVDKHKDANETGGLLHALQLTSEFKNFKKSEHQNGCLFYIPAWNTSKIDPATGFVNLFDTRYTNAEKALEFFRKFDAIRYNEEKDWFEFEFDYDEFTQKAHGTRTRWTLCTHGKRLRSFRNPAKQYNWDSEVVALTDEFKRILGEAGIDIHENLKDAIRNLEGKRRKYLEPLMQFMKLLLQLRNSRKNPEEDYILSPVADENGVFYDSRSCGDTLPKNADANGAYNIARKGLMLIRQIKEAKELGKVKYDISNKAWLNFAQQKPYKNE

SEQ ID NO: 103 - DNA, 3789 bp, unidentified
  source 1..3789: mol_type = other DNA
atgaaggagataaaagagctcactggcctttattcccttaccaagacaatcggcgtcgagctaaaacctgtagggaagacacaggagctgattgaggcccgaaaactcatagagcaggatgaccaaagagcagaggattacaagatagtaaaggacatcatcgatcgctatcataaggactttattgacaagtgcttaaactgtgtcaagataaaaaaggacgatttagagaagtacgtctcgctggcggaaaactccaaccgtgatgccgaggattttgacaacataaagaccaaaatgcggaatcagatcacggaggcttttcgaaagaactcactgtttacaaacctcttcaagaaaaacctcattaaggagtatctccccgctttcgtttctgaggaggagaaatcagtggtgaataagttttcgaagttcacaacctatttcgatgctttcaacgataaccgtaaaaacctgtacagcggcgacgccaaatctgggaccatagcttatcgtctcatccatgaaaaccttccaatgtttctcgacaatatcgccagttttaacactattagcgagatcggtgtgaacgaatatttcagcggcattgaagcagagtttacagataccctggatggcaagcatctggtcgattttttccaggtcgattacttcaacaatacacttacgcagaaaaagatcgataactacaattacgtggttggggccgtcaacaaagctgtgaatctgtataagcagcaacacaagaacgttcgtattcccttgttaaagacgctccataaaatgattcttagtgacagagtgactccgtcatggctgcccgagcggtttgaatgcgatgaggagatgctgaccgccattaaagccgcatacgagagtctaaaagaagtgctcgtgggcgacgatgatgacagtctgcgcaatctgctgctcaatatcgacaactttgaccttgaacatatctatattgcgaaagatagcgggttaacctctatcagccagcagattttcggttattatgacacctacacactggccatcaaagatcagcttcaacgagagaaccccaatttatacgacgaaaggattgacaaactctacaaaaaggagggctctttttctattgcctatttgaacaggctggtggataccaaggagcatataacaatcaacgagtactataggctgttaggatcatattgtagggaagaggggaagagaaaagatgactttttcaagcaaatcgacggggcttactgtgcaatttcccatttgttttggggtaagcatggtgagatcgcacaatcagactcagacatagaactcatccagaaactatttgatgactacaaaggactgcagagatttatcaagcctctgctcggccacggagatgaggctgacaaggataacgaatttgatgctaaattgcgaaaagtctgggacgaattggatattatcaccccattgtatgacaaagtcagaaattggctttccagaaaaatctacaacccggaaaagatcaaattgtgcttcgagaataacggcaagttactgtctggctggtctgataatcaaactaaaagcgataacgggactcagtatggaggctatatttttcggaagaaaaacgaaatcggggagtacgacttctatctgggcatctccgcggacgcaaaactcttccggcgcgatgagaacatctgctatgaagatggcatgtacgaaagattcgattactatcacctgactccaaacaccctgcttggtaaatcatacatcggaaattatggggaggatagcaaagcagtactatcagccttcaatgcagccataactaaactacaactggagaagaaactggtacccaaagataatgagaaagtacctacataccttaagcggctgaagcagaattacgcaaatttctaccaaatcctgatgaatgacgacaatgtggtggatgcttataaaagcatgaaacagcacatcttcgccacgctcacctcccttatccgcgtccctgcagctattgaactcgccacccagactgacctggacattgacgagctgatcgacgaaatcttgaatttgagcagtgagtctttcgggtacttcccagtggccaccgccgctattgaggaagccaacaaaagagaaaaaaagccgctgttcctcttcaagatgagtaataaagacctatcatacgccgcaaagtcctctgaaggattgagaaagagtaggggaaccgagaacctgcatactatgtatctgaaagcgctactggggatgacacaaaacgtgttcagcattgggagcggtatggtcttcttcaggcacaaaacaaaaggcctggcggaaactacggctaggcacaaagccaatgagttcgtggccaacaagaataagctcaatgataagaagaagagcatcttcgcttacgaaattgtcaagaataaacggtatactgtagataagtacctcttcaaactgtcagtcaagctgaattactcccagcccaacaataataagatcgatgtgaattccgaggtgcgggaaataatctctaatggaggtattaagcacattatcggaatcgataggggagagaggaatcttctctatcttagcctgatcgacctaaaaggaaatattgtgatgcagaagtccctcaacattttaaagaacgaacataacgtgaagggcacagactacaaaggccttttaacagaacgcgaaggcgaacgccaggatgccagacgcaattggaagaaaattgcgaacatcaaggatctgaagaggggctacttgagtcaggttgtgcacattatcagcaagatgatggtggagtacaatgcaatagttgtgttagaagacttgaaccccggattcatacgaggacgccagaagatagaaaggaacgtttacgagcagtttgagcggatgctcattgacaagcttaacttttacgttgacaagcacaaggacgccaacgaaacaggtggcctgttgcacgctctgcagttgacgtctgagtttgagaattttaagaagtctgaacaccagaacggctgcctattctatatccctgcctggaacacttccaagatcgaccccgccaccggatttgctaatctgttcgacactcggtacaccaatgccgttgaggcgcagaagtttttttccaaattcgacgaaattcgttacaacgaagagaaggattggttcgaatttgagttcgattacgacaaattcacacagaaggcacacggtacccgaacaaagtggaccctctgcacttatgggatgaggctgcggagctttaagaaccctgccaaacaatataattgggatagtgaggttgtggctttgacagacgaattcaagagaatactggggaaggctggaatcgatattcacgaaaacctgaaagacgccatttgtaacctcgagggtaaaaaggacctggaacctctgatgcagtttatgaagctgctgctgcagcttcgcaattctcggaagaacccagaagaggattacattctgtcgcctgtggcagacgagaatggcattttttacgactcccgcagttgtggcgacaccttgccaaagaatgccgacgccaatggggcatataacatcgcaagaaaagggctgatgctgattgagcagatcaaaaataccgaggacctcgacactatcaaattcgatataagctccaaggcttggctgaactttgctcaacagaagccatataagaatggatga

SEQ ID NO: 104 - DNA, 3831 bp, unidentified
  source 1..3831: mol_type = other DNA
atgaaggagattaaggaactgaccgggctgtacagcctcaccaagacaatcggggtggagctgaagcccgtggggaagacacaggagctgatcgaggccaaaaagctgatcgaacaggacgaccagcgtgccgaggactacaaaatagtgaaagatatcatcgaccggtaccacaaggacttcattgataagtgcctgaattgtgtgaagatcaagaaggatgacctggagaagtacgtcagtctggctgagaattctaacagagacgccgaggatttcgataatattaaaaccaagatgcggaatcagatcacagaaagcttcaagaagaacccactcttcgtggggctgtttaagaaggagctgatcacgaattacctgccaaacttcgtgagcgaggaggaaagagtcgtggtgaataaattcagcaagttcaccacctatttcgatgcctttaatgacaatcggaagaacctgtactccggcgatgccaagtccggcaccatcgcatatcggctgatccacgagaacctgcccatgtttctggacaatatcgccagcttcaacaaaatcagcgaaaccggcgtgaacaaatacttctcagacatcgagaacgagttcacagccatcctgtacgagatgcacctgtccgatctgttccagatcgactactttaataataccctgacccagaagaagattgacaactacaactacatcgtgggtgctgtgaacaaggccgtgaacctctataagcagcagcacaagaccgtgagggtacctctgctcaagaccctgcacaagatgatcctgtccgagcgggtgacacccagctggctgccagagcgcttcgaaagcgatgaggagatgctgaccgccatcaaagagacctacgagtccctgaaggatgtgctggtgggcgggaacgacgatagtctgcgcaacctgctgctcaacatcgacaacttcgacctggagcacatttacatcgccaacgatagcggcctgaccagcatcagccagcagatcttcgggtactacgacacttacacactggccatcaaggaccagctgcagagagagaatcctgccaccaagaaacagagagagaatcctgctaccaaaaagcagagagaaaatccaaacctgaatgatgactgcatcgacaagctgtataagaaggagggctctttcagcattgcctacctgaataggctggtggacaccaaggagcacatcaccattaacgaatattatcgactgctggggagctattggagggaggagggaaaaagaaaggacgacttcttcaagcagattgatggcgcctacagcgacatgctgtatcttttttccacagaacacggggagatcgcacagtctgacagcgacacagccgtggtgcagcagctgctggaggcctacaaggggctgcagagatttatcaaacctctgctgggccacggggacgaggctgacaaggataacgaatttgacgccaaactgaggaaggtgtgggatgaactgaatattatcacccccctgtacgacaaggtgaggaattggctgagcagaaaaatttataatccagagaagatcaagctgtactttgagaacaatgggaagctgctgagcgggtggtcagatagccagaccgagaaggacaacggcactcagtacggcggctacatctttcggaaaaaaaatgaaataggagaatacgatttctacctgggaatcagtaccgacgccaagctcttccgcagagacgagacaatctgctacgaggacggcatgtacgagaggtttgattattatcacctgaagccaaccacactgctcggcaagagctacattggcaattacggcgaggacagtaacgccgttctgagcgccttcaaaaacgcagtgaccaagctgcacctggagaagaagctggtccctaaggacaacgaaaaagtccctacctacctgaagaggctcaagcagaaatacgctaacttctaccagatcctgatgaatgatgtgaatgtggtggacgcctacaagtctatgaagcagcacatcctggctaccctggcttccctgatcagagtccctgccgccattgaactggcagcccagaccgacctggacatcgatgagctgatcgacgagatcatgaacctgccttctgagagcttcggatactttcccgtggcaaccgccgccatcgaggaagctaacaaaagagaaaagaagcccctgtttctgttcaagatgtccaataaagacctgagctacgccgctaagtcttccgagggccttagaaagagcagagggacagagaacctgcacacaatgtaccttaaggccctgctgggcatgacacagaacgtctttagcatcggctctggcatggtgttctttagacacaagaccaagggactggccgaaaccacagcccggcacaaggccaacgagtttgtggccaataaaaataagctgaacgacaagaaaaagagtatcttcgcttacgagattgtgaagaacaagagatttacagtcgacaagtacctgtttaagctgagcgtgaagctcaactactcccagcccaataacaacaaaatcgacgtgaacagcgaggtgagagaaatcatctctaacggcgggatcaagcacatcatcggcatcgaccggggggagcgcaacctcctgtacctgagcctgatcgacctgaagggcaatatcgtgatgcagaagagcctgaatatcctgaaagatgatcataacgcaaaaggaaccgactacaaggggctgctcactgagcgggagggcgagaggcaggacgccagacgcaactggaagaagatcgccaacatcaaggatctgaaaagaggatacctgtcccaggtggtgcatattatctccaagatgctcgtggagtacaacgctatcgtggtgctggaggacctgaatccaggctttattcggggacggcagaagatcgagagaaatgtgtacgagcagttcgagagaatgctgattgacaaactgaacttttatgtggataagcacaaggatatcaatgaggtgggcggactgctgcacgcttttcagctcaccagtgagttcaagaagttcaaaaaatcagaatatcagaatggctgcctcttctacatccctgcatggaagacaagcaagattgatccagctaccggcttcgctaacctgctggacacccgctacacaaacgccgataaggccctggagttttttcgcaagttcgacgccatcagatacaacgaggagaaagattggtttgagtttgagtttgactatgacaaatttacacagaaagctcacggcacacggaccaagtggattctgtgcacccatggaaagagactgcggttcaagagaaatagcaccagagtgcaggaagtggtggtgctgacagacgagtttaagaaaatcctgggggaggcaggaattgatatccacgtgaacctcaaagaagccatctgcaacctggagggcaaaaagaacctggagcccctgatgcagtttatgaagctgctgctgcagctgaggaatagcaaggccggcacagacgaggactacattctgtcccctgtggctgacgaaaacggcatcttttacgattccaggtcctgcggcgaacagctgccagagaacgctgacgctaatggcgcctataatatcgccaggaaggggctgatgctgattcggcagatcaaggaggccaaagagctggacaaagtgaagttcgacatcagcaacaaggcctggctgaactttgcccagcagaagccttacaagaatggctag

SEQ ID NO: 105 - DNA, 3816 bp, unidentified
  source 1..3816: mol_type = other DNA
atgaaagaaattaaagagctgaccggactgtactccctgaccaagaccatcggggtggaactgaagcctgtgggaaagacccaggagctgatcgaggcccgtaaactgattgagcaggacgatcagagagccgaggattacaagatcgtgaaagacatcatcgatagataccacaaggactttatcgataagtgtctgaactgtgtgaaaattgaaaaagacgacctggagaagtatgtgtccctgaccgaaaattccaacagagaggctgtggacttcgacaatatcaaaacaaaaatgaggaaccaaatcaccgagagctttaagaagaaccctctgttcgttgggctgttcaagaaggagctgatcacaaactatctgccaaacttcgtgtccgaagaggagcgggtggtggtgaacaagttcagtaagtttaccacatacttcgacgccttcaataacaaccggaagaatctgtactcaggcgacgccaagagcgggaccatcgcctataggctgatccacgaaaacctgcctatgtttctggacaacatcgccagcttcaacaaaatcagcgagacccgggtgaacgagtatttcagcagcattgaggctgagttcaccgacaccctgaatggcaagcacctggccgatctgttccagatcgattacttcaacaataccctgacacagaagaaaatcgataattacaattatatcgtcggcgccgtgaacaaggcagtgaacctgtataagcagcagcataagaacatcaggatcccactgctgaaaaaaatccacaaaatgatcctctccgacagggtgaccccttcatggctgcctgagcggttcgagtccgatgaggagatgctgaccgccatcaaagcagcctacgagagcctgaaggaggtgctggtgggcgacgacgatgactctctgaggaacttgctgcttaacattgataatttcgacctggagcatatctacatcgctaaggactccggcctgacctctatttcccagcagatttttgggtactatgacacatacactctggccatcaaagatcagctgcagagaaaaaatcctgccaccaagaagcagcgggaaaaccccaacctgtatgacgaaagaattgacaagctgtataagaaagagggaagcttttccatcgcctatctgaaccggctggtggataccaaggaacacattaccattaacgagtactataggctgctgggaagctactgcagggaaggaggcaagtccaatgatgatttctttaagcagatcgacggagcctattcagccatcagctacctgttctctgccgagcacggcgagatcgcacagagcgacagcgataccgccgtggtgcagaagctgctggaggcctacaaaggcctgcagcgcttcatcaagccactgctgggacacggggacgaagccgataaggacaacgagtttgacgtgaagctgcggaaggtgtgggatgagctgaacatcatcacgccactgtatgacaaggtgcgaaattggctgtctcgcaaaatttataatcccgaaaagatcaagctgtacttcgagaacaacggcaagctgctgtctggatggtccgatagtcagaccgagtacgacaacgggacacagtacggcggctatatctttaggaagaagaacgagatcggggagtacgacttctacctgggcatttccgccgacgccaagctgttcagaagggatgaaacaatctgttacgaagacggaatgtacgaacgcctggactattataatctgaaaccgaacaccctgctgggcaatagctacatcgggaactacggcgaggattcgaacgctgtgctgagcgcctttaacgatgccgtgaccaagctacacctggagaagaaactggtgcccaaagacaacgagaaggtgccaacttatctgaagaggctgaagcaggattatgctaacttctaccaaatcctgatgaacgataataacgtggtggatgcctataagagcatgaagcagcatatcctggccacactggcctcactgattagagtgcccgccgctatcgagctgactacacagaccaatctggatattgacaagctcatcgacgaaattatcaatctgcctagcgagagcttcgggtacttcccagtggccaccgcagcgatcgaggaggccaacaatcgggagaaaaagcctctcttcctgtttaaaatgtccaataaagatctgtcctatgccgaaaagttttccaagggcgaccggaaatcccgcggcaccgaaaacctgcacacaatgtacctgaaggccctgctgggaatgacacagaacgtgttctccatcggatccggcatggtgtttttccggcacaacactgagggtctggcagagaccacagcacggcacaaggccaatgagttcattgctaacaagaataagctgaacgacaagaagaagtccatctttgactatgagatcgttaagaacaaaaggttcactgtggacaaatacctgttccacctgtcactgaaactgaactacacccagcccaataagtttgacattaacagcaaggtgcgggagatcatccggaacgggggaatcaagcacatcattggaatcgatagaggcgagagaaacctgatctatctgtccctgatcgacatggaggggaatatcgtgatgcagaaatccctgaatatcctgaaagacgaccacaatgccaagggaaccgactacaagggactgctgaccgagagggagggggagaataaggaggctcggagaaactggaaaaagatcgccaacatcaaggatctgaaaagaggctacctgtcccaggtggtgcatattatcagcaagatgatggtcgagtataatgccattgtggtgctggaggacctgaacccaggcttcatcaggggacggcagaaaattgaaagaaacgtgtacgagcagtttgagcgtatgctgatcgataagctgaatttctacgtggacaagcacaaggacgccaatgagacaggagggctgctgcatgccctgcagctgacaagcgaattcaaaaacttcaagaagtctgaacaccaaaacggctgcctgttctacatccctgcctggaacacatccaagatcgacccagccacaggcttcgtgaatctgttcgataccaggtacactaacgccgagaaggccctggagttcttcagaaaattcgacgcaatccgatacaacgaggaaaaagattggttcgagttcgaatttgactatgacgagtttactcagaaggctcacggcacacgcaccaggtggaccctgtgcacccacggaaaacgcctgaggtccttccggaacccagccaagcagtacaactgggacagcgaagtggtggccctgactgacgagtttaagaggatcctgggcgaggcaggaattgatatccacgagaatctgaaggacgccatccggaatctggaagggaagcgccgcaagtacctggaacctctgatgcagtttatgaaactgctgctgcagctgaggaattcacgcaagaatcctgaggaagactatattctgagccccgtggccgacgaaaatggggtgttttacgatagcaggagctgcggggataccctgcccaaaaacgccgacgccaacggagcttataatatcgctaggaagggcctgatgctgatcaggcagatcaaggaagctaaggagctgggcaaggtgaaatatgatatctccaacaaggcctggctgaactttgcccagcagaagccatacaagaacgagtga

SEQ ID NO: 106 - DNA, 36 bp, unidentified
  source 1..36: mol_type = other DNA
atctacaatagtagaaattattagagcttactagcc

SEQ ID NO: 107 - DNA, 36 bp, unidentified; identical to SEQ ID NO: 106
  source 1..36: mol_type = other DNA

SEQ ID NO: 108 - DNA, 36 bp, unidentified
  source 1..36: mol_type = other DNA
ggctagtatgcttcaataatttctactattgtagat

SEQ ID NO: 109 - DNA, 36 bp, unidentified; identical to SEQ ID NO: 108
  source 1..36: mol_type = other DNA

SEQ ID NO: 110 - DNA, 36 bp, unidentified
  source 1..36: mol_type = other DNA
atctacgatagtagaaattatcaagtccgtatagac

SEQ ID NO: 111 - DNA, 28 bp, unidentified
  source 1..28: mol_type = other DNA
atctacgatagtagaaattatcaagtcc

SEQ ID NO: 112 - RNA, 36 nt, unidentified
  source 1..36: mol_type = other RNA
ggctagtaagctctaataatttctactattgtagat

SEQ ID NO: 113 - RNA, 36 nt, unidentified
  source 1..36: mol_type = other RNA
ggctagtatgcttcaataatttctactattgtagat

SEQ ID NO: 114 - RNA, 36 nt, unidentified
  source 1..36: mol_type = other RNA
gtctatacggacttgataatttctactatcgtagat

SEQ ID NO: 115-117 - skipped (3 entries)

SEQ ID NO: 118 - protein, 1323 aa, unidentified
MNSIEQFTGLYSLSKTLRFELKPIGKTQENIEKNGILERDNERAVAYKSVKKYIDEYHKAFIERVMNSFPHNLSDEEQDIWEEALNNYYTSYHLPATNPQRKETLTEAQDTLRTLISNSFLRDRQYKRLFGKELFQEDLAEFVNTALFETYIRSQKGNNNLTEEEVRQIQENTIREISLFRNFTVYFSGYNENRKNMYVADDKATSIANRMITENLPKFVDNMEVFGKIAASEVANHFETLYKSMEAYLNVISIDEMFKLDYYPILLTQKQIDVYNTIIGGKVLEDGSKIQGLNEYVNLYNQQQKDKANRLPKLKPLFKQILSEHNAISWLPDTFSTDNEMLESIEKCYQNLRTQVFEGEISLKKLLDNLGDYDLEHIYIPNDLQLTNIVQKVYGDWSMVKKAMEEDVKAKNPQRKNETGEKYEERIVKILKSDESFSIAQINNLLKPYLGEKYVPLEKYFITKGAEDNNNVQKPNLFIRIENAYIEAKSLLNTQYPKDRTMSQDKQNVERIKILLDAIKDLQHFVKPLLGKGSEGQKDNTFYGEFIPLWEALDQITPLYNMVRNRMTQKPYSDDKIKLFFENNGSFLNGWVDSKTESDNATQYGGYLFRRKNSIGEYDYYLGISSATKLFRSFNHVSESDKSIFERLDYYQLKGKTFYGALYKGDYEKESSAIKLAIDKFITNNGNTIIREKINTEKRKRQPKVSTAIGYLKFLRQQGVELFDSLLKDGCFEESNQAMITSIKATLASMARIPNAQDYAHKDYSLFSDAMDDVEELLQDVIFSYFPISQKEMDKVLEREEKPMYLFKITNKDLSFAETHEKGLRKSRGTDNLHTMYFKALMSGTQNVFDIGSGTVFFRERKIVYSEEQLGKGHHHEMLKDKFDYPIISNKRYAYDKFQFHLSININYKADKHKDINLLVNEYLKESKVTHIIGIDRGERHLLYLSVIDLQGNIVEQYSLNEIVNEYNDCNYRTNYHDLLDIREKQRDEARRSWLTIESIKELKEGYMSQVVHLIAQLIVKYNAIVVLEDLNTGFIRGRQKVEKQVYQKFEKMLIDKLNYLVDKKKDIYDLGGALNALQLTNKFESFQKIGKQCGFLFYVPAWNTSKMDPTTGFVNMLDTRYENMDKAKAFFAKFRSIRQNVSKGWFEFAIDYNDFTSKAAGTKTQWTLCTYGTRIETKRDTKQNNNFVSDEFDLTDKFKVLFNKYNIDVNGNLMEQICSQNDATFFKELLHMLHLTLQMRNSITGTEVDYLISPVMNASGKFYDSRTCENNLPKNADANGAYNIARKGLWIVEQIKHSDNISKLKIAISNKEWLRYTQGLVD

SEQ ID NO: 119 - protein, 1323 aa, unidentified
MNDLSQFTNLYSLSKTLRFELKPIGKTLENIEKNGILERDNRRSIGYKSIKKVIDEYHKAFIDRVLNDYERKLDETGRIVWRDSLNELYRLYHLSSTEAKRNEEIRKTQEILRKQISECFKKDRQYSRLFGKELIREDLTEFVNTPLFEQYILSQKGNEDLSIDDVRHIQEDVIEDIAQFRDFTTYFSGFYENRRNMYVADDKATSIANRLIMENLPKFIDNIDVFERIAQSEVSGNLETLCKEMEAYLNVNSIAEIFCLDYFSMVLTQKQIDVYNAIIGGMSLEDGTKIKGLNVYVNLYNKKQKEKTCRLPKLKPLFKQILSERNAISWLPDEFTSDKELLESIEKCYQDLKNSVFEGKDSLMVLLKELGEYDLEHIYLHNDSQLTNIAQKQYGDWATIKRAFEESVKAATPAKRNETTEKYAARIEKILKATDSLSLSQINRMLKAYMGDDFKTIESYFTAMGAEDTVDGQKPNLFIRIENAYADVQPLLNTPYPEDKKLSQDKANVAKIKNLLDTIKDLLHFVKPLLGNGTKGEKDNRFYGEFIPLWELLDQITPLYNMVRNRLTKKECSDEKIKLFFENNNGRFLSGWTDNQTESDNGTQYGGYLFRKRNGIGEYDYYLGVSDAKKLFRSFKSVPDSDKSDYERLDYYQLKGKTFYGALYKGDYESESANIKRSIDYFISHNGNSEIKGKINTERRKQQPRISTAIGYLKFIRQHDFGLYKLLLQDAEFEKSNQEMIASIRETLLSLVRIPSAHEYADKTYTLFSNMMDDVEILLKSKVFSYFTVSQSELDEVLVREEKPLYLFKITNKDLSYAETHEKGLRKTRGTDNLHTLYFKALMSGNQSVFDIGSGAIFFREKKINYTDEQMRKGHHHEMLKDKFNYPIISNKRYAFDKFQFHLSISINYNADKNKDINPMVNAYLKESNSTHIIGIDRGERHLLYLSLIDLQGDIVEQYTLNEIGNTNYHDLLGIKEKQRKEARPNWMEIENIRELKEGYMSQVIHIIAQLMVKYNAIVVLEDLNMGFMRGRQKVEKQVYQKFEKMLIDKLNYLVDKQCNATELGGVLNAYQLTNTHKKFLEQYGNQKNALGKQCGFIFYIPAWNTSKMDPTTGFVNLLDTHYENMEKAKAFFGKFKSIRNNAAKGWFEFEFDYDNFTTKAADTRTPWTLYTHGTRIETKRDPKQKNNFVSEEFDLTSKFKELFVKYKIDLNDNLMEQICLQNDASFFKELLHLLQLTLQMRNSKIGTDVDYLISPVMNDKGKFYDSRNCGKNLPENADANGAYNIARKGLWIIDQIKRTDDLSRLRLAISNKEWLQYAQKMV

SEQ ID NO: 120 - DNA, 3972 bp, unidentified
  source 1..3972: mol_type = other DNA
atgaactcgatcgaacaatttaccggtctatattctctctcaaaaacgctgcgatttgaactgaaacccattggaaagacccaagaaaacatcgagaagaacggaatcctggagcgcgacaatgagcgggccgtagcgtacaaatcagtgaaaaagtacattgacgaataccataaggcgttcatcgaaagggttatgaatagcttccctcacaatttaagcgacgaagaacaggacatctgggaggaagctctaaataactattacacaagctaccacctgcccgcgacaaaccctcagcggaaagagacgttgaccgaagctcaagatacattgcgtaccctgatatcaaattctttccttcgcgatagacagtacaaacggctcttcgggaaagagctgttccaggaggaccttgctgagttcgtgaatacagccctgttcgaaacctacatcaggtcacagaaagggaataacaatctcaccgaggaggaagtgcggcagatccaggagaatactatacgggagatatccctgtttaggaacttcaccgtttacttttctgggtataatgagaacagaaagaatatgtacgtggccgacgataaggctacaagcattgccaatagaatgataaccgagaacttaccaaaattcgtggacaacatggaagttttcggcaaaatcgccgccagcgaagtggctaatcacttcgagactttgtacaagagcatggaggcttatctgaacgtgatttccattgacgagatgtttaaactggactattacccaatccttctaacgcagaagcaaattgacgtgtataacaccatcatcggaggtaaggtgttggaggacggttcaaaaatccagggcctgaatgaatacgtgaacctgtataatcagcaacagaaggacaaggctaatagactccctaagcttaaaccactgtttaagcagattcttagcgaacataatgcaatcagttggctgcctgacacattttctacagataatgagatgctagagagcatagaaaagtgctaccagaacttaaggactcaggtgttcgagggggaaatctctctcaaaaaacttctagacaacctcggggattacgacctggagcatatttacattccaaatgacttacagctgacgaacattgtgcagaaggtctacggagactggtccatggtgaagaaggcgatggaggaagatgtaaaggctaagaacccacaacgaaagaatgaaactggggaaaaatacgaggagagaattgtcaagattctgaaaagcgatgaatctttctccattgcacaaattaacaacctgctaaagccctatctgggggaaaagtatgtgccgctcgagaagtattttattacaaagggcgcagaggacaacaacaacgtgcagaagccgaacctgttcatccggatcgaaaatgcctatatcgaagctaagagcttactgaatactcaatatcccaaagaccgcacaatgagtcaggacaagcaaaatgttgaacgtatcaaaatcctcctggatgcaatcaaggatctgcagcattttgttaaacccctgctcgggaagggaagcgagggacagaaagataataccttttatggggagtttatccccctgtgggaggccctggatcagataacgcccctttacaatatggtccgcaataggatgacccagaagccatacagtgacgataaaataaagctcttcttcgagaataacggctcgtttcttaacggctgggtggactcgaaaactgagtccgataacgctactcagtacggcggatacttgtttcggcgcaagaactccataggcgagtacgattattatctcggcatcagctcagccacaaaattattccgatccttcaaccatgttagcgaaagtgacaagagtatttttgaacggctggactactatcaattaaaagggaagaccttctatggcgcactgtacaaaggtgactacgaaaaagaatcatcggcaatcaaactcgccatagacaagttcatcacaaataacggcaataccatcatcagggaaaagataaacacagagaagcgaaaaagacagcctaaggtcagtaccgccattgggtatttgaagtttctgcggcaacagggtgttgagctatttgacagtctactgaaagatggctgttttgaagagagtaaccaggcaatgatcacttctatcaaggccactcttgcctctatggccagaattcctaacgcccaggattacgctcacaaagattactcattattctcagacgctatggacgatgtggaggagctgctgcaggatgttatcttctcctacttccccatctcccaaaaggaaatggacaaagtgttggaaagggaagagaagcctatgtacctttttaagatcaccaacaaggatctgtccttcgccgagacgcatgagaaaggattaaggaaaagtcggggtactgacaacctccatacaatgtatttcaaagcactcatgtccggaacccaaaacgtctttgatataggctccggcaccgtgtttttcagagagcggaagattgtctatagcgaggagcaactgggtaagggacatcatcacgagatgctcaaggacaaattcgactaccctattatctctaacaagcgctatgcatacgataagtttcagttccacctctccattaacatcaactataaggcagacaaacacaaggatattaacctccttgtaaacgaatatctcaaggagagtaaagtcactcacatcatcgggattgacagaggggagaggcaccttttgtatttgtccgtcattgatctccagggtaatattgttgaacaatactctctcaacgagatcgtgaatgagtacaacgactgcaattatagaaccaattaccatgatctgctggatatccgcgaaaaacagagggacgaggcacgacgctcttggttgaccatagagtcaattaaagagctcaaggagggctatatgagccaggtagttcaccttatcgcgcagcttattgtgaaatataatgctatcgtcgtgctggaagatctcaacactggttttattcgtggaagacagaaggtggaaaagcaggtgtaccagaagtttgagaaaatgctgatagataagctgaattatctggtcgataagaagaaagatatctacgatctcgggggtgcactgaatgccttgcagttgaccaacaagttcgaaagcttccagaaaataggcaagcagtgtggcttcctgttttacgtaccagcctggaatacctctaaaatggacccgacaaccggatttgtaaacatgttggatacacggtacgaaaatatggataaggccaaagcgttctttgccaagtttagatcaattaggcagaacgtatctaaaggctggttcgaatttgccattgactacaacgattttactagcaaagccgcaggcactaaaacacagtggacgctttgtacatatggaactcgtattgagacaaagcgtgataccaagcagaataataatttcgtgtctgacgagtttgacttgaccgataagttcaaagtgctgttcaacaagtacaatatcgatgtcaacggaaacttgatggaacaaatctgcagccagaacgacgcaacgttttttaaggagctgctgcacatgctgcacctgacattacaaatgcgcaactccattaccgggactgaggtcgattatctcataagcccagtcatgaacgcttcaggcaaattctatgacagtcgaacctgcgaaaataatttgcccaagaacgctgacgccaatggagcgtacaatatcgccaggaaaggcctgtggatcgtggagcagattaaacactccgacaatatctccaaactgaagattgctatatctaataaggagtggcttcgctatactcagggactcgtcgattga

SEQ ID NO: 121 - DNA, 3972 bp, unidentified
  source 1..3972: mol_type = other DNA
atgaacgacctgtcccagtttacaaacctgtattcactgagcaagacactgaggtttgaactgaagcccatcgggaagaccctggagaacattgaaaagaacggcatactggagagggacaatagacgatctatcggctataagagcatcaagaaggtgatcgacgagtaccacaaagccttcatcgacagagtgctgaacgattacgaaaggaagctggacgaaaccggtaggattgtgtggagggatagcctgaacgagctctacagactgtatcacctgagcagcaccgaggccaaacgcaatgaggagattcggaagactcaggagattctgaggaaacagatcagcgagtgctttaagaaggacaggcagtattctagactgttcggcaaggagctgatcagagaggacttgaccgagtttgtgaacacaccactgtttgagcagtacattctgagccagaagggcaacgaggatctgtcaattgacgacgtgagacatatccaggaggacgtgattgaggacattgcccagtttcgcgactttaccacgtatttttccggcttctatgagaacagacgcaacatgtacgtggccgatgataaggctacctccatcgccaatcggttgattatggagaacctgcctaagttcattgataacatcgacgtgttcgaaagaatcgcccagtctgaagtgtctggcaacctggagacactgtgcaaggagatggaggcctacctgaatgtgaatagcatcgccgagattttctgtctggactacttcagtatggtgctgacacagaaacagatcgacgtgtacaatgcaattatcggaggaatgtcactggaggacgggaccaaaatcaaaggcctgaacgtgtatgtgaatttgtacaacaagaagcagaaggagaagacatgcagactgcccaaacttaagccactgtttaaacagatcctgtcagagaggaacgccatcagctggctgcccgacgaatttacaagtgacaaagagctgctggagtcaatcgagaagtgctaccaggatctgaagaacagtgtgtttgaaggcaaagacagcctgatggtcctgctcaaggagctgggggagtatgacctggagcatatctacctgcataatgacagccagctgactaacattgcccagaagcagtacggcgactgggccaccatcaagagggctttcgaggagagtgtgaaggccgcaacccctgccaaacggaacgagaccaccgaaaagtacgctgccaggattgagaagattctgaaagccaccgattccctgagcctgagccagatcaacaggatgctgaaggcctacatgggcgacgacttcaagaccattgagagctacttcaccgccatgggagccgaggataccgtggatggccagaaaccaaacctgtttatccggatcgagaacgcctacgccgacgtccagcctctgcttaataccccttacccagaggacaaaaagctgtcccaggataaggccaatgtggccaaaatcaagaatctcctggacactatcaaggacctgctgcacttcgtgaaacccctgctgggcaatggcacaaagggggagaaagacaaccgcttctacggagagttcattcccctgtgggagctgctggaccagatcacccccctgtacaacatggtgcgcaatagactgacaaagaaggagtgctccgacgagaaaatcaagctgttctttgagaacaataatggcaggttcctgagcggctggaccgacaaccagaccgagagcgacaatgggacacagtatggcggctacctgtttagaaagaggaatggaatcggtgagtacgactactatctgggcgtgagcgatgccaagaagctgttcagatcctttaagtctgtgccagattccgataagtccgattatgagaggctggactactaccagctgaaaggcaaaactttttacggcgccctgtataagggggactatgaaagcgagtcagccaatatcaagcggagcatcgattatttcatcagtcacaacgggaatagcgagatcaaaggcaagattaataccgagcggcgtaaacagcagcctaggatctccaccgccatcggatacctgaagtttattaggcagcacgactttggcctgtataagctgctgctgcaggacgccgagtttgagaagagtaaccaggaaatgatcgcttccatcagggagaccctgctctccctggtgaggatcccctctgctcacgagtatgccgacaagacctataccctgtttagcaacatgatggacgatgtggagatcctgctgaaaagtaaagtgttcagctatttcacagtgtctcagagcgagctggacgaggtgctggtgagagaggagaagcctttgtacctgttcaagatcaccaataaggacctgagctacgccgagactcatgaaaaaggccttaggaagactcgcgggacagataacctgcacaccctgtactttaaggccctcatgagcgggaaccaatccgtcttcgatattggcagcggagccattttcttcagggagaagaagattaattacaccgacgaacagatgcggaaagggcaccaccacgagatgctcaaagacaagttcaattaccctatcattagtaacaaaaggtacgccttcgacaaattccagtttcacctgtcaatcagcattaactacaacgccgataagaacaaggatattaaccccatggtgaatgcttacctgaaggagtcaaactccacacacatcattgggattgataggggcgagaggcatctgctgtacctgagcctgattgatctccagggggatatcgtcgagcagtacactctgaacgagatcggcaacacaaactaccacgacctgctgggcatcaaggagaagcagaggaaggaggccaggcccaattggatggagatcgagaacatccgcgagctgaaggaggggtacatgagccaggtgatccacattatcgctcagctgatggtcaaatacaacgctattgtggtgctcgaagacctgaatatgggcttcatgcggggccggcagaaggtggaaaaacaggtgtatcagaaattcgaaaagatgctgatcgacaagctgaattacctggtggataagcagtgtaatgccaccgagctgggtggggtgctgaatgcttaccagctgaccaatacacacaagaagttcctggagcagtatggcaatcagaaaaatgcgctgggtaagcaatgcggcttcatcttctacatccccgcttggaacactagcaagatggaccccaccacaggcttcgtgaatctgctggatacccattatgagaacatggagaaagccaaagccttcttcgggaaattcaagagcatcagaaataacgccgccaagggatggtttgagttcgagttcgactacgataacttcaccaccaaggccgccgatacaagaactccttggaccctgtatacccatgggaccagaattgagactaagagggaccctaagcagaagaataacttcgtgagcgaggagttcgacctgaccagcaaattcaaggagctgtttgtgaaatacaagatcgatctgaatgataatctgatggagcagatctgcctgcagaacgacgcctcattctttaaagagctgctgcacctgctgcagctgaccctgcagatgagaaacagcaagattggcaccgatgtggattacctgatcagtccagtgatgaacgataaggggaaattctatgactcccgcaattgtgggaagaatctgccagagaatgctgatgccaatggcgcctataatatcgccagaaagggactgtggattattgatcagattaaacgcaccgatgacctgtcaaggctgagactggccatctctaacaaagagtggctgcagtacgcccagaaaatggtgtga

SEQ ID NO: 122 - DNA, 36 bp, unidentified
  source 1..36: mol_type = other DNA
ggctataggccaaacataatttctactattgtagat

SEQ ID NO: 123 - DNA, 36 bp, unidentified; identical to SEQ ID NO: 122
  source 1..36: mol_type = other DNA

SEQ ID NO: 124 - DNA, 36 bp, unidentified
  source 1..36: mol_type = other DNA
atctacaatagtagaaattatgtgtggttttacacc

SEQ ID NO: 125 - DNA, 36 bp, unidentified; identical to SEQ ID NO: 124
  source 1..36: mol_type = other DNA

SEQ ID NO: 126 - RNA, 36 nt, unidentified
  source 1..36: mol_type = other RNA
ggctataggccaaacataatttctactattgtagat

SEQ ID NO: 127 - RNA, 36 nt, unidentified
  source 1..36: mol_type = other RNA
ggtgtaaaaccacacataatttctactattgtagat

SEQ ID NO: 128 - protein, 1332 aa, unidentified
MNXJXQFTXLYSLSKTLRFELKPIGKTXENIEKNGILERDNXRXXXYKSXKKXIDEYHKAFIXRVXNXXXXXLXXXXXXXWXXXLNXXYXXYHLXXTXXXRXEXJXXXQXXLRXXISXXFXXDRQYXRLFGKELXXEDLXEFVNTXLFEXYIXSQKGNXBLXXXXVRXIQEBXIXXIXXFRBFTXYFSGXXENRXNMYVADDKATSIANRXIXENLPKFXDNXXVFXXIAXSEVXXXXETLXKXMEAYLNVXSIXEXFXLDYXXXXLTQKQIDVYNXIIGGXXLEDGXKIXGLNXYVNLYNXXQKXKXXRLPKLKPLFKQILSEXNAISWLPDXFXXDXEXLESIEKCYQBLXXXVFEGXXSLXXLLXXLGXYDLEHIYJXNDXQLTNIXQKXYGDWXXXKXAXEEXVKAXXPXXXNETXEKYXXRIXKILKXXXSXSJXQINXXLKXYXGXXXXXJEXYFXXXGAEDXXBXQKPNLFIRIENAYXXXXXLLNTXYPXDXXXSQDKXNVXXIKXLLDXIKDLXHFVKPLLGXGXXGZKDNXFYGEFIPLWEXLDQITPLYNMVRNRXTXKXXSDXKIKLFFEXNNGXFLXGWXDXXTESDNXTQYGGYLFRXXNXIGEYDYYLGXSXAXKLFRSFXXVXXSDKSXXERLDYYQLKGKTFYGALYKGDYEXESXXIKXXIDXFIXXNGNXXIXXKINTEXRKXQPXXSTAIGYLKFJRQXXXXLXXXLLXDXXFEXSNQXMIXSIXXTLXSXXRIPXAXXYAXKXYXLFSBXMDDVEXLLXXXXFSYFXXSQXEXDXVLXREEKPXYLFKITNKDLSXAETHEKGLRKXRGTDNLHTXYFKALMSGXQXVFDIGSGXXFFREXKIXYXXEQXXKGHHHEMLKDKFBYPIISNKRYAXDKFQFHLSIXINYXADKXKDINXXVNXYLKESXXTHIIGIDRGERHLLYLSXIDLQGBIVEQYXLNEIXNXXXXXXXXTNYHDLLXIXEKQRXEARXXWXXIEXIXELKEGYMSQVXHJIAQLXVKYNAIVVLEDLNXGFXRGRQKVEKQVYQKFEKMLIDKLNYLVDKXXBXXXLGGXLNAXQLTNXXXXFXXXXXXXXXXJGKQCGFJFYXPAWNTSKMDPTTGFVNXLDTXYENMXKAKAFFXKFXSIRXNXXKGWFEFXXDYBBFTXKAAXTXTXWTLXTXGTRIETKRDXKQXNNFVSXEFDLTXKFKXLFXKYXIDXNXNLMEQICXQNDAXFFKELLHXLXLTLQMRNSXXGTXVDYLISPVMNXXGKFYDSRXCXXNLPXNADANGAYNIARKGLWIXXQIKXXDBJSXLXJAISNKEWLXYXQXXVD

SEQ ID NO: 129 - DNA, 3972 bp, unidentified
  source 1..3972: mol_type = other DNA
atgaattccattgaacaattcaccggattatactccttatcaaagaccttgcgctttgagttgaaacctataggaaaaacgcaagaaaacatagaaaaaaacggtattcttgaaagagacaacgagagagctgttgcgtacaaaagtgtaaagaaatacatcgacgagtatcacaaggcatttattgaaagggttatgaattcttttccccacaatttaagcgatgaggagcaagatatttgggaagaagcgttgaataactattatacatcataccatttacctgcaactaatcctcaaagaaaggaaacgttaacagaagcccaggatactttacgaactcttatttctaatagttttcttagggatagacagtacaaaagactatttggaaaagaactgtttcaagaggatttggcggaatttgtaaatactgccctttttgaaacttatatccgttctcaaaaaggtaataataacttgaccgaggaagaagtccgtcagatacaagagaatacaatcagggagatctcgctcttcagaaactttaccgtctatttttcgggttataacgagaataggaaaaatatgtatgttgcagatgacaaggcaacttctattgccaaccgcatgattacagagaatcttcctaagtttgtcgacaacatggaggtgtttgggaaaattgccgctagtgaagtcgcaaatcatttcgaaactctttacaagtcaatggaagcttatttaaatgtcatatctattgacgaaatgttcaagttggattattatccaatattgctgacgcaaaaacaaatagatgtatacaatacaataattggaggaaaggtgttggaggatgggagtaaaatacaaggcttgaatgaatatgtgaatctttacaaccaacagcaaaaagacaaggcgaatagactccctaaactaaaaccactttttaagcagatacttagtgaacacaatgctatttcgtggttgcccgatacgttttcaactgacaacgagatgctggaaagcattgaaaagtgttatcagaaccttaggacgcaagttttcgaaggggaaatttcattaaagaaactcttggataatttgggagattatgatttggaacatatctatattcccaatgacctccaattgaccaatattgtccaaaaggtatatggagattggtcaatggtcaagaaggcaatggaagaggatgtgaaagcaaagaatccccaaaggaaaaatgagacaggcgaaaagtatgaggagaggattgtaaagatactgaaatctgatgaaagtttttctatagcacaaatcaataacttgctgaaaccttatcttggagaaaaatacgtgccgcttgaaaagtattttattactaaaggtgccgaggataataataatgtgcaaaaacctaatctctttattcgtatagagaatgcatacatagaggcaaaatctctgttgaacacccagtatccaaaagacagaacaatgtcgcaggacaagcaaaatgttgagagaattaagattttattggatgcaatcaaagacttgcaacactttgtaaaacctttgttggggaaggggtctgagggacaaaaagacaacaccttctatggcgagttcattccactttgggaagcacttgatcaaattacgccgttgtacaatatggtgcgtaaccgaatgacacagaagccttattctgatgataaaattaaactttttttcgagaacaatggctcatttctaaatggatgggtcgacagcaaaacagaatcggataatgctactcagtatggcggatatttgttcagaaggaaaaatagtatcggcgaatatgattactatctaggaatctcgtctgccacaaaacttttcagaagttttaatcatgtgtcggaatcggataaaagcatttttgaaagattggattattaccaattgaaaggaaagactttttatggcgctttgtacaaaggagactatgaaaaagaatcttctgctatcaagctggcaattgataaattcattactaataatggaaataccattattagagaaaagataaatactgagaaaagaaaacgacagcccaaggtgtcaactgccattggttatttgaaatttctcagacagcagggagttgaattgtttgattctttattaaaagatggttgctttgaggagagtaatcaagctatgatcacttccattaaagctacattggcgtctatggcgcgcattcctaatgcacaggactatgcacataaggattattcattgttctcagacgctatggatgatgtagaagaattgttgcaagatgttattttttcatatttcccaattagtcagaaagagatggacaaagttcttgagagagaagaaaagcccatgtatttgttcaagataacgaataaggatctttcttttgctgaaactcacgaaaaggggttgaggaaatcaagaggaacagataatttgcacaccatgtacttcaaagcattgatgagtggcactcaaaatgttttcgatattggttctggcaccgttttctttagagaacgcaagatagtgtattctgaagagcaattgggaaagggacaccaccacgaaatgctgaaggataagtttgattatcctatcatatcaaacaagagatatgcatacgataagttccaatttcatttgtcaataaatattaactataaagcagataaacataaagacatcaatcttttggtcaatgaatatctgaaagaatcaaaagtcacgcatatcattggtattgaccgtggagaaagacacctattatatttgtctgtaatagatttgcagggtaatatcgttgagcaatattcattaaacgagattgtgaatgaatataacgactgtaattatcgtactaactatcatgatttattagatatcagagaaaagcaaagggatgaggccaggcgcagttggctaaccattgaaagtatcaaggaattaaaggagggctatatgagccaggtggttcatttaattgcacaactaattgtaaaatacaacgcaatagtcgtgcttgaagacttgaatactggctttattagagggaggcaaaaggttgagaaacaggtttatcagaagtttgaaaaaatgctgattgacaagttgaattatctggtagacaagaaaaaagatatttacgacctgggtggtgcgttgaatgcattgcagttgacaaataaatttgagagttttcagaagataggtaaacaatgtggtttcctgttctatgtccctgcttggaataccagtaaaatggatcctacaacaggatttgtcaatatgcttgatacacgttacgagaatatggataaagctaaagccttttttgcaaaatttaggagtattcgacaaaatgtcagtaagggatggttcgaatttgctattgattataatgattttacctcgaaagcagctggaaccaaaacacaatggacactttgtacctatggcacacgtattgaaaccaaacgcgatacgaagcaaaataacaattttgttagcgatgagtttgacttgacagacaagttcaaggtcttgtttaataaatacaacatagatgtaaacggcaatctaatggagcagatttgctcacaaaatgacgctacattcttcaaagaattactacacatgctacatttgaccttgcagatgcgaaatagtattactggaacagaagtggattatttaatttcacctgttatgaatgcttctggtaagttctacgatagtcgtacttgtgaaaataatctacctaagaatgctgatgccaacggggcctacaacattgctagaaaaggattgtggattgtcgaacagataaaacattcggacaatatatcgaaattaaaaatagcaatcagcaacaaggaatggctacgatatacacaagggttggtagactaa

SEQ ID NO: 130 - DNA, 3972 bp, unidentified
  source 1..3972: mol_type = other DNA
atgaacgacctttcgcaattcaccaatttatattctttatcaaaaactttgcgttttgagttgaagcccatcggcaagactttggagaatattgaaaagaatggtattcttgaaagagacaaccgtcgttctataggatacaaatccattaagaaggtaatagatgaatatcacaaggcgtttatcgaccgcgttctgaatgactatgaacgcaaattggatgaaacaggaagaatcgtttggagagattcattaaatgaactgtatcgtctgtatcatctttcttctaccgaagcaaagagaaatgaagaaatccgcaaaacacaagaaatattacggaaacaaatttcagaatgctttaagaaagacagacaatatagccgtttgttcgggaaagaattaattcgagaggacctaacagaatttgtaaacactcctttatttgagcaatatatcctcagtcagaaaggcaacgaagacttaagtatagatgatgtacgccatattcaagaagatgttattgaggatattgcccaattcagagacttcacaacatatttctctggcttttatgaaaacagacggaatatgtacgttgccgacgacaaagcgacctctatagcaaatcgtctgattatggagaacctcccaaaattcattgacaacatagatgtgttcgaaagaattgcacagagcgaggtgtccggcaatcttgaaactttatgtaaggaaatggaagcttatctaaatgtcaattccattgcagaaatattttgtcttgattatttttcgatggtattgacgcaaaaacagatagacgtatataatgcaattattggcgggatgtcgttggaagacggtacaaaaatcaagggactaaacgtgtatgtgaatctttataataaaaaacaaaaagagaagacctgccgcttgcccaaactgaagcctcttttcaaacaaattctaagcgaacgcaacgccatctcgtggctgcctgatgaatttacaagtgacaaggagttgcttgaaagtattgaaaaatgctatcaagaccttaagaattctgttttcgagggtaaagattctctaatggtgttattgaaagaactcggcgagtatgatttagagcatatctatctacataatgactctcagctaacaaacattgcccagaaacaatatggcgattgggcgacaataaaaagggcttttgaggaatcggtcaaggctgcgactcccgcaaagcgcaacgaaaccaccgaaaagtatgcggctcgaatagagaaaatcttaaaagctaccgacagcttgtctttgtcgcagattaaccgaatgctgaaggcttatatgggtgatgacttcaaaacaattgagtcatacttcacagcaatgggtgcagaagatactgtggacggacaaaagcctaatcttttcatacgtattgaaaacgcctacgcagatgtacagcctttactaaatacaccttatccagaagacaaaaagctgtcgcaagacaaagccaatgttgcaaagataaagaacctattagataccatcaaagacttgctgcactttgtaaaaccattactagggaatgggacaaaaggcgaaaaagacaatcgcttctatggtgaattcattcctttatgggaactgcttgaccaaattacgccattgtataacatggtgagaaacaggctaacaaagaaggagtgttctgacgagaaaatcaaactgtttttcgaaaacaataatggtagatttttaagtgggtggacggacaatcagacagaatccgataacggcactcaatatggtggctatttgttcagaaagaggaatggcatcggagaatacgattattatctgggagtgtctgatgccaaaaaactctttcgtagtttcaaatcagtgccagatagcgataaaagtgactacgaaagactggattactatcagttgaaaggtaaaaccttttatggtgctttgtataaaggcgactatgaatcagaatccgcaaatatcaagcgatctatcgattattttatctcgcataacggtaactccgaaatcaaagggaaaatcaatacagaaaggagaaaacagcaaccaagaatatcaacagccattggatatcttaagtttatcagacaacacgatttcggattgtataaattgcttttacaagatgcggaatttgagaaaagcaatcaggagatgattgcttctattagggagacactattatctcttgtccgtattccatcggcacatgagtatgcagataagacatacaccttgttctctaatatgatggatgatgtcgagattttacttaaaagtaaggtgttttcatacttcacagtaagccaaagtgaactcgacgaagtcctcgttagagaagaaaaaccattgtatctgttcaagattacgaataaagacttgtcttatgccgagactcacgagaaaggattaagaaagactcgcggtaccgacaatttgcatactctttatttcaaagcattgatgagtggaaaccagagtgtctttgacataggatctggggcgattttcttcagagaaaaaaagatcaactacacggatgaacagatgaggaagggacatcaccatgaaatgctaaaagacaaattcaattatccaattatttcaaacaaaaggtacgctttcgacaagtttcagtttcatttgtcaatatcgataaactataatgcggataagaataaagacataaaccccatggtgaatgcctatctgaaagaatccaactccactcatatcattggtattgaccgaggagaaaggcacctgctgtacttgtcgcttattgaccttcagggagatatcgtcgaacaatacactctgaatgagattggaaacaccaattatcacgacctgctgggcataaaagaaaaacagcgcaaagaagctcgccccaattggatggagatagaaaacattagggagctgaaagagggctatatgagccaggtgattcacataattgcccaactgatggtgaaatacaatgctattgtggtacttgaggatttgaacatgggatttatgcgtggtcgtcagaaagtggaaaagcaggtgtatcagaagttcgagaagatgctgatcgacaaattgaactatttagtggataaacaatgcaatgcaactgaactagggggagttttgaacgcctaccaattaacaaatacccataagaaattcttagaacaatatgggaatcagaaaaatgcattaggcaaacagtgtggtttcatattttacattccagcatggaacacaagcaaaatggaccctactaccggctttgtcaacctattggatactcactatgagaatatggaaaaagcaaaagctttctttggcaagttcaagagcattcgcaataatgctgccaaaggctggttcgagttcgagtttgattacgataacttcaccacaaaggccgcagacacaagaacaccttggacgctctacacccatggtactcgcatagagacaaaacgtgaccctaagcagaaaaacaacttcgttagtgaagagtttgatttgacaagcaaattcaaggaactgtttgttaaatacaagattgatttgaacgacaacctgatggagcaaatatgcttacaaaatgatgcttcgttttttaaagaattgcttcacctgctacaactaacacttcaaatgcgaaacagcaagattggaactgatgttgattatcttatatcgcctgtaatgaacgacaaaggaaagttttacgatagtcgtaattgtggcaagaatctaccggaaaatgctgatgcaaatggtgcctacaacattgccagaaagggattgtggattatcgaccagattaagcgcacggatgacttgtcgagattgaggttggccatcagcaacaaggaatggctgcaatatgcgcagaaaatggtgtga

SEQ ID NO: 131 - protein, 1249 aa, unidentified
MDMKSLNSFQNQYSLSKTLRFQLIPQGKTLDNINESRILEEDQHRSESYKLVKKIIDDYHKAYIEQALGSFELKIASDSKNDSLEEFYSQYIAERKEDKAKKLFEKTQDNLRKQISKKLKQGEAYKRLFGKELIQEDLLEFVATDPEADSKKRLIEEFKDFTTYFIGFHENRKNMYAEEAQSTAIAYRIIHENLPKFIDNIRTFEELAKSSIADVLPQVYEDFKAYLKVESVKELFSLDYFNTVLTQKQLDIYNAVIGGKSLDENSRIQGLNEYINLYNQQHKDKKLPFLKPLFKQILSDRNSLSWLPEAFDNDKQVLQAVHDCYTSLLESVFHKDGLQQLLQSLPTYNLKGIYLRNDLSMTNVSQKLLGDWGAITRAVKEKLQKENPAKKRESDEAYQERINKIFKQAGSYSLDYINQALEATDQTNIKVEDYFINMGVDNEQKEPLFQRVAQAYNQASDLLEKEYPANKNLMQDKESIEHIKFLLDNLKAVQHFIKPLLGDGNEADKDNRFYGELTALWNELDQVTRLYNKVRNYMTRKPYSVDKIKINFKNSTLLNGWDRNKERDNTAVILRKDGKFYLAIMHKEHNKVFEKFPVGTKDSDFEKMEYKLLPGANKMLPKVFFSKSRIDEFKPSAELLQKYQMGTHKKGELFSLNDCHSLIDFFKASIEKHDDWKQFNFHFSPTSSYEDLSGFYREVEQQGYKLTFKSVDADYINKMVDEGKIFLFQIYNKDFSEHSKGTPNLHTLYWKMLFDERNLQNVVYKLNGEAEVFFRKKSLTYTRPTHPKKEPIKNKNVQNAKKESIFDYDLIKNKRFTVDSFQFHVPITMNFKSEGRSNLNERVNEFLRQNNDAHIIGIDRGERHLLYLVVIDRHGNIVEQFSLNSIINEYQGNTYATNYHDLLDKREKEREEARESWQSIENIKELKEGYLSQVVHKIADLMVKYHAIVVLEDLNMGFMRGRQKVEKQVYQKFEKMLIDKLNYLVDKKQDAETDGGLLKAYQLTNQFESFQKLGKQSGFLFYVPAWNTSKIDPCTGFTNLLDTRYESIEKAKKFFQTFNAIRYNAAQGYFEFELDYNKFNKRADGTQTLWTLCTYGPRIETLRSTEDNNKWTSKEVDLTDELKKHFYHYGIKLDADLKEAIGQQTDKPFFTNLLHLLKLTLQMRNSKIGTEVDYLISPIRNEDGTFYDSRQGNKSLPANADANGAYNIARKGLWVINQIKQTPQDQKPKLAITNKEWLQFAQEKPYLKD

SEQ ID NO: 132 - protein, 1233 aa, unidentified
MDHFTNLYPVSKTLRFELIPDKRTKAILERTDLIAQDEHRAESYKLVKKIIDRYHKKFIDSVLGTLKLPLDELDSLHELYSKSQKSDADKKALEKIQDKLRKLIADALTKDSRYKRIDKKELIREDILSVIEPEEQALIDEFRDFTTYFTGFHENRRNMYSAEAQSTAIAYRLIHENLPKFIDNMATFEKIAASPVAEHFPQLYQEMAEYLNVREIGDLFKLDYYTELLTQSQIEAYNAVIGGRTVEESGKKIQGINEYVNLYNQQQPSRDTRLPKLKPLFKQILSDREAVSWLPEEFESDKDMLTAVKECYHSLNDHVFDPLRELLTNLSSYNLDGIYIPNDLSLTDISQAMFKDWSVIKKAIAEDVKRNCPLKRNEKADNYEERISKLIKRENSFSIGYMNHCIQEKDICDHFATLGASDNGEEQTVNLFLQIQNAYTDAQSLIENDYPEDRNLAQDKENVARLKALLDAVKALQRFVKPLRGNGDEPDKDERFYGELAVLWEELDHITPLYNKVRNRMTRKPYSIEKFKLNFQNSTLLDGWDLNKERDNTGVIMRKDGKYFLAIMNKQFNRIFVDAPQAGHDEDTFEKMEYKLLPGANKMLPKVFFSKSRIEEFKPSPELLEHYEKGTHKKGDNFSLKDCHELIDFFKASIAKHEDWSKFDFHFSPTDTYEDLSGFYREVEQMGYKISYKQIPVSYIDKMVEEGKLFLFQIYNKDFSPYSKGTPNLHTLYWKMVFDERNLANVVYKLNGQAEVFYRKKSLDYDRPTHPANQAIKNKNPETTKKESTFDYDIIKDKRFTMDKFQFHVPITINFKATGSGSINPLVNQYIHDHDDLHFIGIDRGERHLLYVTVIDSKGCIKEQFSLNEIVNEYQGNTYKTNYRSLLDKRDDERQRERQSWNTIEGIKELKQGYLSQVIHKIVSLMVKYHAVVVLEDLNMGFKRGRQKVESSVYQQFEKALIDKLNLLIDKKIDADQPGGLLHAYQLTNKFTSFRDMGRQNGFLFYIPAWNTSKIDPVTGFVDLLHPRYESVDKSRSFFCKFKSIRYNQDKGWYEFTMDYNDFTTKAEGTRTEWTLCTHGTRVETFRNAEKNSSWDSREVNLTDEFNALFATYGVEPQGNLKQAIAERSQKEFFDKLTHLLALTLQMRNNITGTEVDYMISPVADENGKFFDSRTCGKELPENADANGAYNIARKGLWVARQIQAAHVDEKVNMAISNKEWLSFAQSKPYLND

SEQ ID NO: 133 - protein, 1239 aa, unidentified
MKQLNDLTGLYSLSKTLRFELKPIGKTLEHIESKGFITQDEKRAEEYKRVKDIIDRYHKSFITMCLCGFKFNQEDLDTYAALAEDFNRDEKAFEESKKTLRKQIVGAFKKGGGYSDLFKKELIQKHLPEIVTDDEEKKMVENFSKFTTYFTGFNENRKNMYSDEEKSTAIAYRLIHDNLPMFLDNTRSFSRIADSDVRQSFCKIESSFSEYLNVEHLAEMFQLDYFSETLTQEQIAVYNHVVGGRTLEDGTKIQGINEYVNLYNQQHKDNRLPLLKPLYKMILSDRVALSWLPDEFANDKEMIDAIKETYDSLKENLTGDGDGSLRNLLLNINNYDIEHIYIANDLGLTDISQQMFGQYDVYTSAIKQELRNSVTPTAKERREPELYAERINKLFKSTKSFSVAYLNSLVDAEHTIQNYYQQLGAYDRDGEQRINLFTQLEMAYVAAKDILSGKHGNISQTDAEIAIIKNLLDAYKSLQHFIKPLLGNGDEADKDNEFDAKLREVWDALDIVTPLYNKVRNWLTRKPYSTEKIKLNFENAQLLNGWDKNKETDCTSVLLRKDGKYFLAIMDKKANRAFDVEDLPCDGICFEKMNYKQIALPMGLGAFVRKCTGSAKKLGWTCPSSLLNKDMKIIIKDDEATNVLPSLIECYKDFLNIYEKDGFKYKDFNFKFKPTHEYKKLSHFFAEVPTQGYKITFRKVSESFINQLVDEGKLYLFQIWNKDFSEFSKGSPNMHTLYWKMLFDERNLADVVYKLNGQAEVFYRKSSLDVANTTIHKAHQPILNKNQENKKQQSTFDYDIIKNRRYTVDKFQFHVPISINFKATGRDNVNSQVLDIIRNGGIKHIIGIDRGERHLLYLSLIDLKGNIVKQMTLNDIVNEYNGNTYATNYRDLLAEREGNRTEARKNWKKIENIKDIKQGYLSQVVHIISKMMVEYDAIVVLEDLNMGFMRGRQKIERSVYEQFEKMLIDKLNYYVDKQKDVNEAGGLLHALQLTSRFESFKKLGKQSGCLFYIPAWNTSKIDPVTGFVNLFDTRYTNADQARKFFSLFDSIRYNAEKNWFEFAFDYDKFTTKAKGTRTRWTLCTYGTRIRTFRNPAKLNQWDNKEVVLTDEFKKAFADAGIDIHGNLKEAICSLEDKKYLEPLMHLMKLLLQMRNSITNTEVDYLLSPVADKNGSFYDSRVCSYALPKDADANGAYNIARKGLWAIRQIQETPVGERPNLAIKNNEWLKFAQQKPYRDE

SEQ ID NO: 134 - protein, 1254 aa, unidentified
LLNYKYYIVMKTYDELTGLYSLSKTLRFELKPVGKTLEYIENKGIIAQDEKRAEEYKLVKGIIDRYHKSFIRLCLYNFKLKLESDNGLDSLEEYVEYASIQRRTDTQDAEFKKVKENLRKQIVSAFKNGATYGDLFKKELIQQILPDFADNDEERQLVDNFSKFTTYFTGFHENRKNMYSEDDKATAIAFRLIHENLPLFIDNMKSFAKIAETVVAEHFADIETAFEDCLNALIPDMFALPYFTKTLTQEQIEVYNNIIGGRVLEDGTKIQGINEYVNLYNQQQKDKSARLPLLKPLYKMILSDHVAISWLPEEFASDEEMLSAINGAYDMLKDVLSEKNEDSLFNLLKNINEYDTEHIFIANDLGLTDISQQIFGQYDVYSSVIKAELRNQASMTAKEKKNPELYEDRIAKLYKSAKSFSIDYLNSFVDSEKSIQNYYAQLGAYDRDGEQRINLFAQIEMKHIAVADILAGKVANLNQSEQGIKLIKDFLDAFKALQHFIKPLLGNGDETDKDNAFDARLRVAWDTLDIITPLYNKVRNWLTRKPYSEEKIKLNFENAQLMNGWDLNKEPDCTSIILRKDDKFYLAIMDKKANHSFDTDELPNEGDCYEKVDYKLLPGANKMLPKVFFSKSRIDEFAPSQSLLDAYEKGSHKKGTNFSLNDCHNLIDFFKQSIAKHEDWKKFPFDFSDTSSYEDISGFYREVEQQGYMLSYRNVSAAYIDKLVDEGKLFLFQIWNKDFSEYSKGTPNMHTLYWKMLFDEKNLANVVYKLNGQAEVFYRKKSLDIANTTVHTANRPIANKNKDNKKKESTFEYDIIKNRRYTVDKFQFHVPITMNFKSIGNDNINESVLNVIRNNGIKHIIGIDRGERHLLYLSLIDLKGNIVKQMTLNDIVNEYNGNTYSTNYKDLLATREGDRTDARRNWQKIENIKDLKEGYLSQVVHVIAKMMVEYKAIVVLEDLNMGFMQGRQKIERNVYEQFERKLIEKLNFYVDKQKKADEVGGLLNAYQLTSKFDSFKKLGKQSGCLFYIPAWNTSKIDPVTGFVNMLDTRYENTEKARCFFSKFDSIRYNTQKDWFEFAFDYGNFTTKADGTQTKWTLCSFGTRVKTFRNPEKVNQWDNVEVVLTEEFKSLFADAGININGNLKEQICNLSDKKYLEPLMGLMKLLLQLRNSITNSEVDYLLSPVCDNKGNFYDSRTCSNKLPKDADANGAYNIARKGLWALARIVDSAEGERPNLAISNKDWLCFAQQKPYLND

SEQ ID NO: 135 - protein, 1242 aa, unidentified
MERFDELTGLYSLSKTLQFELKPIGKTLEQIERKGIIAQDEKRAEEYEIAKCIIDEYHKAFISMCLKGLRLNLSSTGSLDSLEEYVEQASKLRRSESEEKNFDTIKQNLRRQIVNSFKSRGGSFTDLFKKELITQHLPEFVSEKNKKQIVENFSKFTTYFTGFHENRKNLYSEEEKSTAIAYRLIHENLPMFIDNIKTFAKIADSDVANYFVEIETTFSEYLDGSHITDMFKLEYFTETLTQEQISLYNNVIGGVSNEDGTKKKGLNEYVNLYNQQNKTRLPLLKPLYKMLLSDKVSLSWLPDDFVSDEEMIYAINEMQLSLKDLLYSDGENSLKYLLTHIGDYDTEHIYISNDLGLTDISQQIFGQYDVYTSGIKTELCNQIKQSAKEKREPELYKERINKLFKSAKSFSINYLNSFAEGDKTIQAYYARLGAHDLEGEQSTNLFTQIEMASIAASDILAGKHTNINQSEEDTKLIKDLLDTYKALQHFIKPLLGNGDEADKDNEFDARLRNAWDALSVVTPLYNKVRNWLTRKPYSTEKIKLNFDNAQLLGGWDLNKEPDCTSVLLRKDDMFYLAIMDKKYNHAFDIDELPCEGECYEKVDYKLLPGANKMLPKVFFSKSRISEFAPSLAIQKSYNEGTHKKGSNFSISDCHRLIDFFKQSIAKHEDWSKFPFSFSDTKRYEDISGFYREVEQQGYMLSYRNVSVSFINQLVDEGKLYLFQIWNKDFSKYSKGTPNMHTLYWKMLFDEVNLADTVYKLNGQAEVFYRKSSLKLENTTIHKANQTIKNKNVQNEKKTSTFDYDIVKNRRYTVDKFQFHVPITLNFKATGGDNINANVQDIIRNNGIEHIIGIDRGERHLLYLSLIDLKGNIVKQMTLNDIINEYKGNIYKTNYKDLLVTREGDRTEARRNWHKIENIKDLKEGYLSQVVHIIARMMAEYKAIVVLEDLNMGFMRGRQKIERNVYEQFERMLIDKLNYYVDKQKKATENGGLLHALQLANKFESFKKLGKQSGCLFYIPAWNTSKIDPVTGFVNLFEIHYENVDKARCFFSKFDIIQYNEERDWFEFAFDYNDFGTKAEGTKSKWTLCTYGTRIKTFRNPNKLNQWDNEEVVLTEEFKKIFNEAGIDINGNIKDAICQLKEKKHLESLMHLMKLLLQMRNSVSNSEIDYLLSPVADENGEFYDSRTCAPTLPKDADANGAYNIARKGLWVIEQIKQTADKPRLAMTNKEWLKFAQDKPYLNE

SEQ ID NO: 136 - protein, 1245 aa, unidentified
MNTFNELSGLYSLRKTLQFELKPIGKTLENIEKKGIIEQDTQRDVEYKKVKGIIDNYHKAFIKMCLWNLELKLESDGHSDSLEDYVRLASIIRRGELDEIEFSKVKDNLRKQIVSAFKNGNSYGDLFKEELIQEHLPNFVTDEAEKQMVDNFSKFTTYFSEFHKNRKNMYSDEKKSTAIAYRLIHENLPIFIDNIKTFKKIANTEIVNHFADIKQAFQECLNVENIDEMFQLNYFTKTLPQEHIETYNNIIGGKTNEDGSKIQGLNEYINLYNQQQKDHSNRLPLFKPLYKMILSDREALSWLPEEFASDEEMINAINEVYDSLKNVLANDNNGLKHLLLNINQYDTEQIYIANDLGLTDISQQMFGKYDVFTSGIKNELRGQISPSAKEKREPELYEEKINKIFKSARSFTINYLNSFVQDGKTIQSYFAQLGATNTDSAQCIDIFTKIEMAHIAATDILEGKHNSIDQSDSDIKLIKDLLDAYKELQHFIKPLLGSGDEAMKDNEFDAQLHYAWDSLNIITPLYNKVRNWLTRKPYSTEKIKLNFENAQLLGGWDMNKETDCTSVLLRKDNMYYLAIMDKKSNHAFDIDVLPNEGDCYEKVDYKLLPDAYKMLPKVFFSKSRINEFAPSKDIQNAYQKGTHKKGPNFSISDCHRLIDFFKQSIAKHEDWQKFPFSFSDTDSYDDISGFYREVKQQGYMLGYRKVSVSFINQLIDDGKLYLFQIWNKDFSEHSKGMPNIHTLYWKMLFDERNLSNIIYRLNGKAEVFYRQNSLKLENTTIHKANQPIKNKNIQNSKECSTFDYDIIKNRRYTADKFQFHVPITLNFRSTGSDNINNKVNDVIRNNDIEHIIGIDRGERHLLYLSLIDLKGNIVKQMTLNDIVNEYNGNTYKTNYKDLLVQREGDRTEARRNWQKIENIKEIKEGYLSQVIHIITKMMVEYKAIVVLEDLNMGFMRGRQKIERNVYEQFEKKLIDKLNYYVDKQKDITDAGGLMHALQLANKFESFKKLGKQSGCLFYIPAWNTSKIDPVTGFVNLLDTHYENIDKARCFFSKFDSIRYNASNDWFEFELDYDKFTDKARGTKTHWTLCSYGTRIRTFRNPLKLNQWDNEEVVLTEEFKKVFNNANIDIYGNLKNSICSLNDKTTLESLMQLMKLMVQMRNSITGTETDYLLSPVTDANGNFYDSRNNIPTLPIDADANGAYNIARKGLWIIQKIQQSQPGEKLNLAISNREWLQFAQQRPYLNE

SEQ ID NO: 137 - protein, 1243 aa, unidentified
MKTFNDLTGLYSLSKTLRFELKPVGKTKDNIETKGIIAQDEKRAEEYKKVKDIIDRYHKKFIEMCLANLKLKTISDGNNDSLKEYVTLASKANKDEKEDNDFKDVKTALRKQIVDAFKKGGSYSDLFKKELIQVHLPDFVTDEQEKQMVENFGKFTTYFTGFNENRQNMYSDEEKSTSIAYRLIHENLPMFIDNIKSFAKIAEHEDIDFLPDIENGFKEELKRLKAQSISEVFDLANFTNTLTQSQIDSYNAIIGARHDENGDKVQGINQYVNLYNQKNKDARLPLLKPLYKMILSDRGALSWLPEEFATDEEMLAAINETHGNLKNVMTDVRKLLQNIDSYDTEHIYIANDKGLTDISQQIFGQYDVYTSAIKAELRDSITPSAKERKDPELLEKRINDIFKASKSFSIEYLNSHVDSDKTIQSYYKELGAYDRNGEQRINLFSQIELAYVDAHDVLLGKHTNLNQSEDSIKKIKALLDAYKALLHFIKPLLGNGDEADKDNEFDAKLRAIWDELDIVTPLYDKVRNRLTRKPYSTEKIKLNFDNAQLLNGWDMNKEPDCTSVLLRKDGQYYLAIMDKKSNHAFDIDELPCNGECYDKMDYKLLPGANKMLPKVFFSKSRIKEFAPSKEICDAYQKGTHKKGANFSIKDCRRLIDFFKDSIAKHEDWSKFPFTFSDTSTYEDISGFYREVEQQGYMLGYRKVSVSFINQLVDEGKLYLFQIWNKDFSEYSMGTPNMHTLYWKMLFDERNLANVVYKLNGQAEVFYRKKSLDLNKTTIHRANQPIANKNMQNEKRESTFCYDIVKNRRYTVDKFQFHVPITINFKATGSDNINASVLDVIRNNGIEHIIGIDRGERHLLYLSLIDMKGNIVKQMTLNDIINEYKGNTYTTNYKELLQAREGDRKEARQNWQKIENIKELKEGYLSQVVHVITKMMVEYKAIVVLEDLNGGFMRGRQKIERQVYEKFEKMLIDKLNYYVDKQRDANENGGLLHAYQLASKFDTFKKLGKQSGCLFYIPAWNTSKIDPVTGFVNMLDTRYENADKARNFFSKFKSINYNADKNWFEFVIDDYSKFTDKAKDTRTDWVLCTYGTRIKTFRNPEKLNQWDNKEIVLTDEFKKVFMEAGIDINGNLKEAICTLTEKKHLESLMQLMKLLVQMRNSETNSEVDYLLSPVADTEGHFYDSRNCGDNLPKDADANGAYNIARKGLWAVMKIKASKPQENLKLGISNKEWLQFAQEKPYLND

SEQ ID NO: 138 - protein, 1254 aa, unidentified
MKNILEQFVGLYPLSKTLRFELKPLGKTLEHIEKKGLIAQDEQRAEEYKLVKDIIDRYHKAFIHMCLKHFKLKMYSEQGYDSLEEYRKLASISKRNEKEEQQFDKVKENLRKQIVDAFKNGGSYDDLFKKELIQKHLPRFIEGEGEEEKRIVDNFNKFTTYFTGFHENRKNMYSDEKESTAIAYRLIHENLPLFLDNMKSFAKIAESEVAARFTEIETAYRTYLNVEHISELFTLDYFSTVLTQEQIEVYNNVIGGRVDDDNVKIQGLNEYVNLYNQQQKDRSKRLPLLKSLYKMILSDRIAISWLPEEFKSDEEMIEAINNMHDDLKDILAGDNEDSLKSLLQHIGQYDLSKIYIANNPGLTDISQQMFGCYDVFTNGIKQELRNSITPTKKEKADNEIYEERINKMFKSEKSFSIAYLNSLPHPKTDAPQKNVEDYFALLGTCNQNDEQQINLFAQIEMARLVASDILAGRHVNLNQSENDIKLIKDLLDAYKALQHFVKPLLGSGDEAEKDNEFDARLRAAWNALDIVTPLYNKVRNWLTRKPYSTEKIKLNFENAQLLGGWDQNKEPDCTSVLLRKDGMYYLAIMDKKANHAFDCDCLPSDGACFEKIDYKLLPGANKMLPKVFFSKSRIKEFSPSESIIAAYKKGTHKKGPNFSLSDCHRLIDFFKASIDKHEDWSKFRFRFSDTKTYEDISGFYREVEQQGYMLGFRKVSETFVNKLVDEGKLYLFHIWNKDFSKHSKGTPNLHTIYWKMLFDEKNLTDVVYKLNGQAEVFYRKKSLDLNKTTTHKAHAPITNKNTQNAKKGSVFDYDIIKNRRYTVDKFQFHVPITLNFKATGRNYINEHTQEAIRNNGIEHIIGIDRGERHLLYLSLIDLKGNIVKQMTLNDIVNEYNGRTYATNYKDLLATREGERTDARRNWQKIENIKEIKEGYLSQVVHILSKMMVDYKAIVVLEDLNTGFMRSRQKIERQVYEKFEKMLIDKLNCYVDKQKDADETGGALHPLQLTNKFESFRKLGKQSGWLFYIPAWNTSKIDPVTGFVNMLDTRYENADKARCFFSKFDSIRYNADKDWFEFAMDYSKFTDKAKDTHTWWTLCSYGTRIKTFRNPAKNNLWDNEEVVLTDEFKKVFAAAGIDVHENLKEAICALTDKKYLEPLMRLMTLLVQMRNSATNSETDYLLSPVADESGMFYDSREGKETLPKDADANGAYNIARKGLWTIRRIQATNSEEKVNLVLSNREWLQFAQQKPYLND

SEQ ID NO: 139 - protein, 714 aa, unidentified
LTRKPYKTEKIKLNFENSQLLGGWDVNKEPDCTSVLLRKDGMYYLGIMDKKANKSFYCDCLPSEGSSYEKVDYKLLPGANKMLPKVFFSKSRKSEFAPSEVITKAYENGTHKKGANFSLSDCHRLIDFFKASINKHEDWSRFGFIFSETNTYEDMVGFYREVEQQGYMLGFRNVSEEYIDRLVDDGKLYLFQIWNKDFSEHSKGTPNLHTIYWKMLFDERNLENIVYKLNGQAELFYRKKSLDLCKTTVHKAHQSVANKNPQNDKRESIFEYDIIKNRRYTVDKFQFHVPITINFKATGDDRLNSATLEAIRDGGIEHIIGIDRGERHLLYLSLIDLKGNIVKQFTLNEIASEYNGAPCPPTNYKDLLVAREGDRNEARRNWQKIENIKEIKEGYLSQVVHIIAKMMVEYKAIVVLEDLNMGFMRGRQKIERQVYEKFEKMLIDKLNCYVDKQKEATDIGGVLHPLQLTSRFESFRKLGKQSGWLFYIPAWNTSKIDPVTGFVNMLDTRYENVDKTRCFFSKFDVIRYNGDKDLFEFTFDYDKFTDKAKGTRTKWTLCTYGSRIKTFRNPKKNNQWDNEEIVLTDEFKKAFADAGIDIEGNLKDAICSLTEKKHLEPLMNLMKLLLQMRNSKTGTEIDYLLSPVADADGNFYDSRNEISTLPKDADANGAYNIARKGLWAIRKIQSAPSGEKPNLAISNKEWLQFAQQKPYLDD

SEQ ID NO: 140 - protein, 1283 aa, unidentified
MNTFNQFTNLYNVQKTLCFELQPVGKTRENIEEDGLLKQDEERAENYKKVKGFIDEYHKQYIKDRLWNYELPLKGEGKRNSLEEYQQFYELSKRDANQEATFTEIKDNLRAIIAKRLTEKGSAYERIFKKELIREDLIEFLDKEEDKELVRQFSDFTTYFTGFHENRANMYKDEEQSTSIAYRLIHQNLPKFMDNIKAFSAIAQTPVAEHFKELYARWESYLNVSSIDEMFRLDYFSHTLTQPHIEVYNSIIGKRILEDGTEIKGINEYVNLYNQQQKDKKLPLFVPLYKQILSDRERLSWLSEEFDSDAKMLKAINECYDHLHDLLMGKENESLCELLKHLTDFNLSQINITNDLSLTDISQSMFGRYDVFTTGLKNTLKISTPQKRDEKEEAYEDRITKLFKACKSFSIAELNGLQLPVAEDGGHKRVEDYFISLGAVGKEKNLFEQIEEAYTEALPILQLKETDDTLSQNKAAVAKIKDLLDAFKNLQHFVKPLLGSGEENEKDEVFYGAFQTLWDELDAVTPLYNKVRNWLTRKPYSTEKIKLNFDNAQLLDGWDENKETANASIILCKDGFYYLGIVKKDNRKLLGMPMPSDGECYDKVVYKFFKDITTMVPKCTTQKKDVVAHFAHSNEDYILFDKKTFNAPVTITKEIYELNNILYNGVKKFQIEYLRSTGDKSGYEHAVFTWKTFCLQFLKAYKSTSIYNLKLVEQHIDSYYDLSSFYSAVNLLLYNLSYRKVSMSYVHSLVEEGKLFLFRIWNKDFSEYSKGTPNLHTLYWKMLFDERNLADVVFKLNGQAEVFYRKASIKQENRIIHPAHQAINNKNPLNRTPTSTFDYDIIKNKRYTVDKFLFHVPITINFKAKGLTNINPLVLDVIRKGGFSHIIGIDRGERHLLYLSLIDLKGNIVKQMTLNEIINVYREQTYVTNYHNLLAQREGDRTKARRSWDTIENIKELKEGYLSQVVHVISKMVVEYHAIVVLEDLNMGFMQSRQKIERQVYEKFEKMLIDKLNCYIYKQVDPTSEGGVLHALQLTNKFESFRKLGKQSGCLFYIPAWNTSKIDPLTGFVNFINPKYESIQAARDLIGKFEDIRYNPEKNYFEFHIKDYAAFNPKAKSSRQEWVICTKGTRIRTFRNPDKNNEWDSEEIVLTEKFKELFDSYGIDYRCNLLASILIQTKKDFFHNEDVKKPSLLSLLKLTLQLRNSHINSEVDYILSPVADAKGSFYDSRTCGSSLPNNADANGAFNIARKGLMLVERIRSIKDDEKPALTITNEEWLHYAQAQ

SEQ ID NO: 141 - protein, 1279 aa, unidentified
MKSLTNLYPVSKTLRFELQPIGKTKENIEKHGILSRDEQRAEDYITVKKYIDEYHKQLIKDRLWNFKLPMKSDSKLNSLQEYQELYELSKRDACQEDRFTELKDNLRAIIAKQLTGGTAYGRIFKKELIREDLIDFLTQEEEKETVRQFADFTTYFTGFHENRKNMYSAEEKSTAIAYRLIHQNLPKFMDNMKAFAKIAKSPVAEKFANIYKEWEDSLNVSCLEEIFQLDYFSETLTQPHIEVYNYIIGKKTKEDGNDVKGINEYVNEYNMRHKDNPLPLLVPLYKQILSDREKLSWIAEEFDSDEKMLSAINESYNSLHDVLMGEENESLRSVLLHIKDYNLERVNINSESLTDISQHIFGRYDVFTNGIKAKLRGKNPKKRNESDESFEDRITKIFKTQKSYSIAYLNNLPQPTMEDGRVRTIEDYFISLGAINIEAKQKINLFAQIENAYHDAFTILKRTDTDDTLSQDKKAVEKIKVLLDAFKDLQHFIKPLLGSGEENEKDELFYGIFQLIWDELEAITPLYNKVRNWLTRKPYSTEKIKLNFDNAQLLDGWDENKETANASIILCKDGLYYLGILNKDYRKLLGMPMPSEGDCYDKVVYKFLKDITTMVPKCTTQKKEVVAHFGQSVEDYVLFDPKTFNAPVTVTKEIFDLNNVLYNGVKKFQIEYLRSTDDSLGYEHAVSTWKSFCMQFLKAYKSTSIYNLASVEQKMNSYSDLSSFYKAVNLLLYNLSYRKVSVDYIHSLTEEGKLYLFRIWNKDFSEFSKGAPNLFTLYWKMIFDERNLDNVVYKLNGQAEVFFRKSSIKPENRVIHPAHRPIDNKNEQNKKRTSTFKYDIIKDYRYTVDKFQFHVPITIGFKSEGQTNINSRVQDIIRRGGFTHIIGIDRGERHLLYLSLIDLRGNIVMQKTLNVISREVRGVTYSTNYRDMLEKREGDNKEARRSWGVIESIKELKEGYLSQAIREIANMMVEYNAIVVLEDLNQGFMRGRQKIERQVYEKFEKMLIDKLNCYVDKQIAPSSIGGALHPLQLTNKFESFRKLGKQSGCLFYIPAWNTSKIDPVTGFVNLFDTRYDTREKARMFFSKFKRIKFNTEKDWFEFAFNYNDFTSKAEGTRTEWTLCTYGERIRQFRNPEKNHNWDDETIVLTDEFKRLFCEYGIDIHGNLKESIVAQSDAKFFRGLLGLMKLLLQMRNSIANSEEDYLLSPVMDEKGCFFDSRDNDGTLPENADANGAYNIARKGLWIIRKIRETAENEKPSLKITNKQWLLFAQSKPYLND

SEQ ID NO: 142 - protein, 1284 aa, unidentified
MNTSNLSRFTNLYSISKTLRFELQPLGKTKDYIEKNGILMRDEKRAEDYKTVKGIIDEYHKKYIKSRLWDFKLPLASEGKRDSLEEYKALYEVSKRSEADEAAFKEVKDNLRSIIAKRLTSGKAYETIFKKELIREDLINSLEDEVEREIVSQFADFTTYFGGFHENRKNMYDAGEKSTAIAYRLIHQNLPKFMDNMKAFAKIAETSIAEHFADIYEGSKEMLNVGSIEEIFRLDYFSEILTQPHIEVYNSIIGKRVLEDGTEIKGINEYVNLYNQQQKDKRLPLLVPLYKQILSDREKLSWLAEEFDCDEKMLAAINETYAHLHDLLMGNENESLRSLLLHLRDYDLEQINISNDLSLTDISQHLFGRYDVFTNGIKEELRVITPRKRKETDEQLEDRISKIFKTQKSFCIAFLNSLPQPAMEDGKARCIEDYFMALGAVNNETTQKENLFAQIENAYENAKSVLQMKETGDMLSQNKPAVAKIKALLDALKDLQHFIKPLLGSGEENEKDELFYGSFQMMWDELDAVTSLYNKVRNWLTRKPYSTEKIKLNFDNAQLLDGWDENKETTNASILLYKDGNYYLGIIKKEDRKILGSPMPTDGECYDKVVYKFFKDITTMVPKCTTQKKDVIAHFMHSDDDYILYDKKTFDAPVTITKEIYNLNNVLYNGVKKFQIEYLRSTGDKRGYEHAVFIWKSFCMHFLKAYKSTSIYNLVLVEQQINSYYDLSSFYNAVNLLLYNLSYRKVSVNYIHSLVDEGKLYLFRIWNKDFSEYSKGTPNLHTLYWKMLFDERNLADVVYKLNGQAEVFYRKSSIQPEHRIVHPAGKPIANKNEHSKEPTSTFKYDIVKDRRYTVDKFQFHVPITINFKAAGQENINPVVLDAIRRGGFTHIIGIDRGERHLLYLSLIDLQGNIVEQMTLNEIINEYKGLKHKTNYHDLLAKREGERTEARRSWDTIENIKEMKEGYLSQVVHIISKMMVEYNAIVVLEDLNTGFMRSRQKIERQVYEKFEKMLIDKLNCYIDKQVGASDIAGLLHPLQLACEAKKWKRSHQCGCLFYIPAWNTSKIDPVTGFVNLFDTRYENAAKAKAFFGKFGSIRYNAEKDWFEFAFDYNDFTTKAEGTRTEWTLCTYRERIRTFRNPQKNHQWDDEEIVLTDAFKQLFDKYDIDMKGNLKEAICAQNDVQFFKDMMELMKLLLQMRNSITNSETDYLLSPVADEKGQFFDSRRGITTLPDNADANGAYNIARKGLWVIRKIQETAENEKPSLAITNKEWLQFAQTKPYLNE

SEQ ID NO: 143 - protein, 1246 aa, unidentified
MKQFTNLYPVSKTLRFELQPIGKTKENIEKNGILTRDEKRAKDYQVVKGFIDEYHKQYIKDRLWNFKLPLASEGNLDSLEEYQMLYEMPRRDDTHEEDFSEVKDNLRAIITKRLTENGSAYDRIFKKELIREDLIEFLNNEEDKALVRQFADFTTYFSGFHENRRNMYSAEEKSTAIAYRLIHQNLPKFMDNMKAFAKIAETSVAEHFSNIYEGWEEYLNVGSIEEIFRLDYFSETLTQPHIEVYNYIIGKKVLEDGTEIKGINEYVNLYNQQQKDKSKRLPFLVPLYKQILSDREKLSWLAEEFDSDEKMLGAINESYTHLHELLMGEENESLRSLLLHLKEYDLSQINITNDLSLTNISQHLFGRYDVYSNAIKEQLKIIIPRKKKETDEEFEDRISKIFKTQKSFSISFLNNLPHPETENGKPRSVEEYFISIGTINTKTTQKENLFAQIENAYENVRVILQMKDTGNALSQNKPAVTKIKALLDAFKDLQHFIKPLLGSGEELEKDELFYGSFQMIWDELNTVTPLYNKVRNWLTRKPYSTEKIKLNFDNSQLLGGWDVNKEPDCTGILLRKDSFYYLGIMDKKANRVFETDITPSEGDCYEKMVYKQLGQISQQLPRIAFSKTWQQKLSIPEDVIKIKKNESFKKNSGDLQKLISYYKSFISQHDEWNSYFDINFTDRNDYKNLPDFYSEVDSQFYSLSFSRVPSSYINQLVDEGKLYLFRIWNKDFSEYSKGTPNLHTLYWKMLFDERNLSNVVYKLNGQAEVFYRKASIQPENRIIHKANLSIVNKNELNKKRTSTFEYDIIKDRRYTVDKFQFHVPITINFKGTGQLNINPIVQETIRQGGFTHIIGIDRGERHLLYLSLIDLNGNIVKQMTLNDIFNEYKGQTYKTNYHDLLVKREGDRTDARRSWDTIETIKELKEGYLSQVVHVISKMMVEYKAIVVLEDLNTGFMRGRQKIERQVYEKFEKMLIEKLNCYIDKQADATEVTGLLHPLQLTCEAKKWKRSHQCGCLFYIPAWNTSKIDPVTGFVNLLDTRYDTREKARLFFSKFQRISFNTEKGWFEFTFDYNDFTTKAEGTRTQWTLCTHGERIRTFRNPQKNNQWDNERIVLTDEFKKLFDQKEIDISGNMKEAICNQKDAQFYRDLLGLMKLLLQMRNSIANSEEDYLLSPIADKNGHFFDSRERISSLPVDADANGAYNIARKGLWIVRKIRNTSEGEKLSLAITNKEWLLFAQSKPYLND

SEQ ID NO: 144 - protein, 1249 aa, unidentified
MKKLTNLYPVSKTLRFELQAIGKTKENIEKNGILQRDEKRAEDYKIVKSLIDEYHKQFIKDRLWNFKLPLHNEGHLDSLEEYQALYEISKRNDTQEAEFTEIKDNLRSIISKRLTECGSAYERIFKKELIREDLIDFLESNEDKDIVRQFADFTTYFSGFHENRRNMYVAEEKSTAIAYRLIHQNLPKFMDNMKAFAKIAETSVAEHFTDIYEGWKEFLNVGSLEEIFRLDYFSETLTQPHIEVYNYIIGKKILEDGAEIKGINEYVNLYNQQQKDKSKRLPFLVPLYKQILSDRDKLSWLADEFDSDEKMLAAINESYNHLHDLLMGLENESLRSLLLNIKDFNLSQINISNDLSLTDISQHLFGRYDVFTSGIKDELRIITPRKKKESDEEFEDRISKIFKTQKSFSVDFLDKLPQPVMEDEKPRTIEDYFMTLGAVNTEATQKENFFAQIENAYEDARTILQIKDTGDTLSQNKSAVAKIKALLDALKDLQHFIKPLLGSGEENEKDELFYGSFQMMWDELDTVTSLYNKVRNWLTRKPFSTEKIKLNFDNSQLLGGWDVNKEPDCKGILLRKDDFYYLGIMDKKSNRIFEADVTPTDGECYDKIDYKLLPGANKMLPKVFFSKSRIDEFAPSEAIVSSYKRGTHKKGAVFNLADCHRLIDFFKQSINKHEDWSKFGFHFSDTKSYEDISGFYREVEQQGYMLSSHPVSSSYIDTLVSEGKLYLFRIWNKDFSESSKGTPNLHTLYWKMLFDERNLVDVVYKLNGQAEVFYRKASIKPENCIIHKANQPIANKNELNTKRASTFKYDIIKDKRYTVDKFQFHVPITINFKAAGQNNINPIVQEAIKQDEFSHIIGIDRGERHLLYLSLIDLKGNIVKQMTLNEIINEYKGQTYKTNYHDLLAKREGDRTEARRSWETIETIKELKEGYLSQVVHIISKMMVEYNAIVVLEDLNTGFMRGRQKIERQVYEKFEKMLIDKLNCYIDKQLSPTDEGGLLHPLQLTCDAQKWKRSHQCGCLFYIPAWNTSKIDPVTGFVNLLDTHYDTREKARVFFSKFQRISYNAPKGWFEFAFDYNDFTTKAKGTRTQWTLCTQGERIRTFRNPQKNHQWDDERIMLTDAYKQLFDKYDIDINGNIKEAISSQTDAQFFKDLMGLMKLLLQMRNSITNSEEDYLLSPVANGTGHFFDSREGISSLPKDADANGAYNIARKGLWVVQKIQETPEGEKPSLTITNKEWLQFAQTKPYLND

SEQ ID NO: 145 - protein, 1255 aa, unidentified
MKEKEQYSDFSRLYPVSKTLRFELKPIGRTMKNIEKNGILERDNQRANDYKIVKEFIDEYHKQHIKDRLWDFKLPLKSDGRLDSLKEYQELYELSKRDANQESAFTEIKDNLRSIIARRLTHDSPAYKRIDKKELIREDLLEFLENEEDKEIVRQFADFTTYFTGFHQNRQNMYTAEEKSTAIAYRLIHQNLPKFMDNMKAFAKIAETSVAEHFADIYEGWKEYLNVGSIEKIFQLDYFSETMTQPHIEVYNYIIGKKILEDGTEIKGINEYVNLYNQQQKDKSQRLPFLVPLYKQILSDREKLSWMAEEFDSDEKMLAAINESYVHLHDLLMGTENESLRSLLSHMKDFNLEQININNDLSLTDISQHLFGRYDVFTNGIKDELRAITPRKKKESDEDFEDRISKIFKTQKSFSISLLNKLPQPVMEDGKPRTVEEYFMSLGAVNTETTQKENLFAQIENAYENARSILQMKDTGDALSQNKQAVAKIKALLDAFKDLQHFIKPLLGSGEENEKDELFYGVFQLIWDELDTMTPLYNKVRNWLTRKPYSTEKIKLNFDNAQLLGGWDVNKEPDCTGVLLQKDGFYYLGIMNKKANRIFESKVTPSNEDCYEKIDYKLLPGANKMLPKVFFSKSRIDEFAPSEAIVDSYRRGTHKKGPDFNLSDCHRLIDFFKDSIAKHEDWSKFVFHFSETSTYEDISGFYREVEQQGYMLASHPVSVSYVEQMVDEGKLYLFRIWNKDFSEHSKGTPNLHTLYWKMLFDERNLADVVYKLNGQAEVFYRRASIKPKNRIIHQANSPIANKNELNEKRTSTFKYDIIKDRRYTVDKFQFHVPITIGFKAIGQNNINPIVQDTIRQGGFTHIIGIDRGERHLLYLSLIDLKGNIIKQMTLNDIVNEYNGVLYKTNYRDLLKKREGERTDARRSWETIETIKELKEGYLSQVVHIISKMMVEYNAIIVLEDLNTGFMRGRQKIERQVYEKFEKMLIDKLNCYIDKQTNPEDVGGLLHPLQLTCDAQKWKRSHQCGCLFYIPAWNTSKIDPVTGFVNLFDTRYETREKARLFFSKFQRIDFNTESDWFEFSFDYNDFTTKAEGTRTKWTLCTYGERIRTFRNPEKNHQWDDERIVLTDEFTQLFERYNIDIQGNLKEAISAQSDAQFYRELLGLMKLLLQMRNSITNSEEDYLLSPVADESSHFFDSRENVEILPNNADANGAYNIARKGLWVIRRIQETAENEKISLAISNKEWLQFAQTQPYLND

SEQ ID NO: 146 - protein, 787 aa, unidentified
LQLTDTEDKLSQNKPAVGKIKALLDAFKDLQHFIKPLLGSGEENEKDELFYGAFQLIWDELDTVTPLYNKVRNWLTRKPYSTEKIKLNFDNAQLLGGWDVNKEPDCTGVLLRKDGFYYLGIMNKKSNRIFDADVTPADGICYEKIDYKLLPGANKMLPKVFFSKSRIDEFAPSEAILSSYKRGTHKKGADFSLSDCHRLIDFFKASINKHEDWSKFGFQFSDTKTYEDISGFYREVEQQGYMLSSHQVSEAYINQMVEEGKLFLFRIWNKDFSEYSKGTPNMHTLYWRMLFDERNLADVVYKLNGQAEVFYRKASIKAENQIMHPAHHPIENKNTLNEKRSSTFDYDLVKDRRYTVDKFQFHVPITINFKAIGQTNVNPIVHETIRRGGFTHVIGIDRGERHLLYLSLIDLKGHIVKQMTLNEIINEYNGLAHKTNYYDLLVKREGERTTARRSWDTIENIKELKEGYLSQVIHIISKMMVEYNAIVVLEDLNMGFMRGRQKIERQVYEKFEKMLIDKLNCYIDKQADSQSEGGLLHPIQLANKFESFRKLGKQSGCLFYIPAWNTSKIDPVTGFVNLFDTRYETREKAKLFFSHFQRICFNAEKDWFEFSFDYNDFTTKAEGTRTQWTLCSYGTRIRNFRNPLQNHQWDDEEIVLTEAFKALFDKYDIDIHANLKEAINAQTDAQFFKDLMGLMKLLLQMRNSKTNSEVDYLLSPVADEHGRFFDSRAGAGSLPDNADANGAYNIARKGLWVIRKIQETPEGEKLSLAITNKEWLEFAQTKPYLND

SEQ ID NO: 147 - protein, 1264 aa, unidentified
LGLFLRLRPKLFVILCKSNSNVMRNLTNLYPVSKTLRFELQPIGKTKENIEKNGILQRDEKRAEDYQKVKNLIDEYHKQFIKDRLWTFELPLEILEEYKELYETPKRDEAAFTEVKDNLRALIASQLKAKGSIYDRIFKKELIREDLIEFLDNEEDKEIVRQFADFTTYFSGFHKNRENMYSAEEKSTAIAYRLIHQNLPKFMDNMKAFALIAKSPVAEHFPDLYSAWEECLNVASIEEMFRLDYFSQTLTQTGIEVYNYIIGKKILEDGTEIKGINEYVNLYNQQQKDKKERLPLLVPLYKQILSDREKLSWLAEEFDSDEKMLNAINELYAHLHDLLMGEENESLHSILLQLKEYDLSQINIANDLSLTAISQQMFGRYDVFTNGMKDILRTITPHKKKETEEDFEERISKILKIQKSISIAELNKLPQPISEDGGKPKLVEDYFMSLGAVDDGVTQKANLFAQIENAHTDALSVLQLTGTGDTLSQNKTAVAKIKTLLDAFKDLQHFIKPLLGSGEENEKDELFYGSFQLFWDELDAVTPLYNKVRNWLTRKPYSTEKIKLNFDNAQLLGGWDVNKEPDCTGILLRKDGLYYLGIMNKKSNRIFDASVTPSDGDCYEKIDYKLLPGANKMLPKVFFSKSRIDEFAPSDAIINSYKRETHKKGANFSLRDCHRLIDFFKQSISKHEDWSKFGFHFSDTSSYEDISGFYREVEQQGYMLSSHPVSSAYIHQMVDEGKLFLFRIWNKDFSEYSKGTPNLHTLYWKMLFDERNLADVVYKLNGQAEVFYRKASIKPENRIIHPANQDIKNKNALNEKATSRFEYDIVKDRRYTVDKFQFHVPLTINFKATGQANVNPVVQEAIRKGEFTHIIGIDRGERHLLYLSLIDLKGRIVKQMTLNEIVNEYNGHSHTTDYHGLLADREGQRTTARRSWDTIENIKELKEGYLSQVIHVITKMMVEYKAIVVLEDLNMGFMRGRQKIERQVYEKFEKMLIEKLNCYIDKQADPTDVGGLLHALQLTNKFESFKKLGKQSGCLFYIPAWNTSKIDPVTGFVNLFDTRYETREKSRLFFSRFDRIAYNQDKDWFEFSFDYDNFTTRAEGCRTHWTLCTQGTRIRNFRNPQKNNQWDDEEVNLTALFKQLFDLYDIDIHGNLMEAIQRQTEAKFYQELMHLMKLTLQMRNSRINSEVDYLLSPVADEKGRFFDSRSGDCVLPDNADANGAYNIARKGLMLIQTIRETPDGEKPSLTITNREWLRFAQEKPYLVD

SEQ ID NO: 148 - protein, 1248 aa, unidentified
MKQFTNLYPVSKTLRFELQPIGSTKENIEKNGILSRDEQRAEDYKKVKNLIDKYHKQFIKDRLWNFQLPLENKGNLDSLEEYRILYETPKRDEAVFTEVKDNLRALIVNQLKAKGSAYERIFKKELIREDLIEFLDMEEDKKTVRQFADFTTYFTGFNENRANMYSAEEKSTAIAYRLIHQNLPKFMDNMKAFAQIVQSPVAEHFTDLYSYWEEYLNVASIEEMFQLDFFSQTLTQTGIEVYNYIIGKKILEDGTEIKGINEYVNYYNQHQKDKKQRLPLLVPLYKQILSDRERLSWLAEEFDSDEKMLKAINELYVHLHDLLMGKENESLRSLLLKLKEYDLSQINIANNFSLTAICHQMFGRYDVFINGMKDILRAITPHKKKETEEEFEERISKILKTQKSISIAELNKLPQPVCEDCCKPKLVEDYFMSLGAVDDGVTQKLNLFAQIENAHTDALSVLQLTGTGDTLSQNKPAVAKIKNLLDTFKNLQHFIQPLLGSGEENEKDELFYGSFQLFWDELDAVTPLYNKVRNWLTRKPYSTEKIKLNFDNAQLLGGWDVNKESDCTGVLLRKGAYYYLGIMNKKANRIFDACITPSNGDCYEKIDYKLLPGANKMLPKVFFSKSHIDEYAPSDVIIENYKKGTHKKGADFSLQDCHRLIDFFKQSISKHEDWSKFGFQFSPTCSYEDISGFYREVEQQGYMLSTHPVSSAYIDEMVAEGKLFLFRIWNKDFSEYSKGTPNLHTLYWKMLFDKRNLADVVYKLNGQAEVFYRKASIKPDNRIIHPANQDIKNKNALNENKTSRFEYDIIKDHRYTVDKFQFHVPITINFKAIGQANINPIVNDAIRKGVFTHIIGIDRGERHLLYLSLIDLKGRIIKQMTLNEIVNEYNGHSHATNYRDLLANREGERTTARRSWDTIENIKELKEGYLSQVIHVITKMMVEYKAIVVLEDLNTGFMRGRQKIERQVYEKFERMLIEKLNCYIDKQTTPTAEGGLLHALQLTNKFESFKKLGKQSGCLFYIPAWNTSKIDPTTGFVNLFDTRYETREKSRLFFSRFDRIAYNRDKDWFEFSFDYNNFTTKAEECRTRWTLCTQGTRIINFRTPQKNNQWEDEEVNLTVLFKQLFDRYDINIHGNLMETIQQQTEAKFYQELMHLLKLTLQMRNSRTNSEVDYLLSPVADEHGHFFDSREDIETLPNNADANGAYNIARKGLWVIRKIQETPEGERPSLAITNKEWLQFAQTKPYLND

SEQ ID NO: 149 - protein, 1273 aa, unidentified
MTQKFDDFIHLYSLSKTLRFEARPIGDTLRNFIKNGLLKRDEHRAESYVKVKKLIDEYHKAFIDRVLSNGGLNYEDKGEYDSLTEYYVLYSTTRRDETTQKHFKATQQNLRDQIVKKLTDDDAYKHLFGKELIESYKDKEDKKKLHEADLVQFINTANPKQRLNFSKKEAIDLVKEFCGFTSYFGDFHKNRKNMYSAEEKSTGIAYRLINENLPKFIDNMESFKKIAAIPEMEDNLKEIHDNFAEHLNVENIQNMFQLNYYNQLLTQKQIDVYNAIIGGKTDEEHKEKIKGINEYVNLYNQAHKDAKLPKLKTLFKQILSDRNAISWLPEEFDNDQEALNAILDCYARLSENVLGKENLKRLLCSLSEYDTKGIFLRNDLQLTSISKKMSGSWTDIPSAIKNDMKDGAPAKKRKESEEDYEKRIDNLFKKLDSFSIGYIDDCLNKFDNNNTFTIEGYFKELGAKDTQSEDIFKQIANAYTDVKPLLNSPYPKSKNLSQDKENVKKIKRFLDALMSLVHFVKPLLGNGDESNKDEKFYGELSLLWTELETIVPLYNMVRNYMTRKPYSNSKIKLNFENSQLLGGWDVNKEKERASILLRRNGLYYLAIMDKDSSKLLGKSMPSDGECYEKMVYKQISFNSGFGGFIRKCFNSATELGWKCSPTCLNKDGKIIILDEEATDIRPELIDNYKSFLDIYEKDGYKYKNFGFHFKKSSEYENINDFFKEVEQQGYKITFTNVSVAFIDKLVKEGKMYLFQIYSKDFSEYSKGTPNMHTLYWKALFDDRNLKDVVYKLDGQAEMFFRKKSINCNHPTHPANQPIQNKNKDNKKKESVFKYDLTKDRRYAVDKFMFHVPIKMNFKSTGTENINLPVREYLKTSNDTHIIGIDRGERHLLYLVVIDLHGNIVEQYSLNDIVNEYNGNTYRTNYHDLLDAREEDRLKQRQSWQTIENIKELKEGYLSQVIHKITQLMIKYHAIIVLEDLNMGFMRGRQKVEKQVYQKFEKMLIDKLNYLVDKKADIESTGGLLNAYQLTNKFPGFKNLGKQSGFLFYIPAWNTSKIDPVTGFVNLLDIRNVDKAKAFFAKFDSIWYNKEKDWFEFALDYDKFGSKAEGTRTKWTLCTQGKRIKTFRNADENSNWDYQIIDLTKDLKQLFAQYNIDINGNLKEAISNQTEKTFFVELLGLLKLTLQMRNSITGTETDYLVSPVADENGNFYDSRTCGHSLPENADANGAFNIARKGLMIIEQIKASDNLSKLKFDISNKSWLNFAQQKPYKHE

SEQ ID NO: 150 - protein, 1270 aa, unidentified
MKRKFDDFIHLYSLSKTLRFEASPIGDTLRNFKKNGLLERDKHRAESYVKVKKLIDEYHKVFIDRVLNGSVLNYVNKGKYDSLTEYYDLYSVPKKDETSQKHFKAIQQHLRQQIVKKFTDDKNYKRLFGKELLESYKDKEDKKKLNEADLVQFINAANPEQLLSLSKKEAIDLVQEFSGFTTYFNEFHKNRKNMYSAEEKSTGIAYRLINENLPKFIDNMKSFKKIVDIPEMKDNLKQIHEYFVDYLNVENIHEMFQLDYYNQLLTQKQIDVYNAIIGGKTDNEHKEKIKGINEYVNLYNQTHKDAKLPKLKVLFKQILSDRNAISWLPEEFKDDQEVLNAIKDCYARLSKNVLGDNILKELLCSLAEYDTKGIFLRNDLQLTDISQKMFGNWSVIPSAIKKDVAPAKKRKELEEDYEKRIDNLFKKRESFSIDYIDSCLDKFDENNTHTIEGYFATLGAVDTPTTQRENIFAQIANTYTDLEPLLKSPYSKNKNLSQDKDNVAKIKLFLDALMSLMHFVKPLLGKGDESNKDEKFYGDFTLLWTELETVVPLYNMVRNYMTRKPYSKSKIKLNFDNSQLLGGWDANKESDYASILLRRDGKYYLAIMDKDSKKLLGKSMPSDGECYEKMVYKLLPGANKMLPKVFFATSRIKDFKPSEQLLENYNKGTHKKGVNFSISDCHALIDYFKQSINKHEDWKNFNFNFSETSTYEDLSAFYREVEQQGYKITFTNVSVSFIDKLVEEGKMYLFQIYNKDFSEYSKGTPNMHTLYWKALFDERNLKDVVYKLNGQAEMFFREKSIKVSTIHPANRPIQNKNKDNKKKESIFEYDLIKDRRYTVDKFMFHVPITMNFKSADTENINLPVREYLQTSDDTHIIGIDRGERHLLYLVVIDLQGNIVEQYTLNDIVNEYNGNTYRTNYHDLLNAREAERLKARQSWQTIENIKELKEGYLSQVIHKITQLMIKYHAIVVLEDLNKGFIRGRQKVEKQVYQKFEKMLIDKLNYLVDKKADIETTGGLLNAYQLTSKFESFQKLGKQSGFLFYIPAWNTSKIDPVTGFVNRLDTRYHNVDKSKAFFAKFDSIRYNKEKDWFEFALDYKNFGNKAEGTRTKWTLCTQGKRIKTFRNAEKNSNWDYQIIDLTKELKQLFAHYDIDINGNLKKAISNQTEKTFFVELMQFLKLTLQMRNSITNTETDYLVSPVADENGNFYDSRKCGSSLPENADANGAFNIARKGLMIIEQIKASDDLSKLKFDISNKSWLNFAQQKPYKHE

SEQ ID NO: 151 - protein, 1121 aa, unidentified
LVQFINTANLKQRLNLSKEEAKDLVQEFCGFTTYFGDFYQNRENMYSAEEKSTGIAYRLINENLPKFIDNMETFKKIAAIPEMEDNLKEIHDNLSEHLNVENIQDMFQLNYYNQLLTQKQIDVYNAIIGGKTDDEHKEKIKGINEYVNLYNQAHKDAKLPKLKTLFKQILSDRNAISWLPEEFDNDQETLNAIKDCYAHLSGNILKDENLKRLLCSLSEYDTKGIFLRNDSQLTSISKKMSGSWTDIPSAIKNDMKDGVPAKKRKESEEDYEKRIDNLFKKQDSFSIDYMDACLNKFVENNPYTIEGYFKELGAKDTQSEDIFKQIENAYTDVKPLLNSTYPKNKNLSQDKENVAKIKRFLDTLMSLVHFVKPLLGKGDERNKDEKFYGELSLLWTELETIVPLYNMVRNYMTRKPYSNSKIKLNFDNSQLLGGWDANKESDYSSILLYRDGKYYLAIFDKDSKKLLGKSMPSDGECYEKMVYKLLPGANKMLPKVFFAKSRIKDFKPSEQLLEKYNKGTHKKGKNFSISDCHALIDFFKQSINKHEDWKNFDFNFSETSTYEDLNSFYREVELQGYKITFTKVSASFIDKLVEEGKVYLFQIYNKDFSEYSKGTPNMHTLYWKALFDDRNLKDVVYKLNGQAEMFFRKKSINCNHPTHPANQPIQNKNKDNKKKESVFEYDLIKDHRYTVDKFMFHVPITMNFKSTNEKDINLHVREYLQTSNDTHIIGIDRGERHLLYLVVIDLHGNIVEQYTLNDIVNEYNGNTYRTNYHDLLDAREEDRLKQRQSWQTIENIKELKEGYLSQVIHKITQLMIKYHAIIVLEDLNIGFMRGRQKVEKQEYQKFEKMLIDKLNYLVDKKADIESTGGLLNAYQLTNKFASFKKLGKQSGFLFYIPAWNTSKIDPVTGFVNLLDTRYQNVDKAKAFFAKFDSIRYNKDKDWFEFALDYNNFGSKAEGTRTKWTLCTQGKRIKTSFNKMSSKWNNQEIDLTKDLKQLFVQYDIDINGNLKEAISKQTKYTFFVELMGLLKLTLQMRNSITGTETDYLVSPVADENGNFYDSRTCGPSLPENADANGAFNIARKGLMIIEQIKASDDLSKLKFDISNKSWLNFAQKKPYKHE

SEQ ID NO: 152 - protein, 1307 aa, unidentified
MAKKFEDFTKLYPLSKTLCFEARPIGATKSNIIKNGLLDEDKHRAESYVKVKKLIDEYHKAFIDRVLADGCLCYKNEGNEDSLEEYYEFYSLSSKDKSDDTRKHFATIQQNLRSKIAETLTKDKAYANLFGNKLIESHKDKEDKNNIIDSDLIQFVSTATPDQLDSQSKDDATKLIKEFWGFTTYFTGFFENRKNMYTSEEKSTGIAYRLINENLPKFIDNMESFKKIMEKPEMSANMEELRANLEEYLNVESISEMFELNYYNMLLTQKQIDVYNAVIGGKTDEEQDIKTKGINEYVNLYNQQHKDAKLPKLKTLFKQILSDRNAISWLPEEFDKDQNVLNAIKDCYVRLTANVLGNNVLNSLLSTLSEYNTESIFIRNDIQLTNISQKMAGSWNYIQDAIKQDIKNVAPARKRKESEEDYEERISKNFKKADSYSIKYIDDCLNRAYKNNTYTVEGYFATLGATNTPSLQRENLFAQIANAYTNISSLLSSDYSAEKNLAQDKENVAKIKTLLDCIKSLQHFVKPLLGKGDESDKDERFYGELSMLWKELDTVTPLYNMVRNYMTRKPYSQKKIKLNFENPQLLGGWDANKEKDYASILLRRDGKYYLGIMDKESKKLLGKPMPSDGDYYEKMVYKFFKDITTMIPKCSTQLKAVKEHFSKSNADFVLSGKNFNTPLIISKEVFELNNVKYGQFKKFQKDYVATTNDIEGYAHAVKIWIKFCMDFLGTYDSTISYDLSSLASNEYTSLDTFYQDVNRLLYAVSFIKVSVSHIDSLVEEGKMYLFQIYNKDFSEYSKGTPNMHTLYWKALFDERNLADVVYKLNGQAELFYREKSIDCTHPTHPANHPILNKNKDNEKKESIFEYDLIKDRRYTVDKFMFHVPITMNFKSTGADNINQLVREHLKDADAPHIIGIDRGERHLLYLVVIDMHGNIKEQFTLNDIVNEYNGNTYRTNYHDLLDAREDARLKARQSWQTIENIKELKEGYLSQVIHKITQLMVKYHAIVVLEDLSMGFMRGRQKVEKQVYQKFEKMLIDKLNYYVDKKANAEQAGGLLNAYQLTSKFDSFQKLGKQSGFLLYIPAWNTSKIDPVTGFVNLLDTRYQNVEKAKAFFCKFEAIRYNSNKNWFEFTIDYNNFGQKAEGTRTKWTLCTQGKRIRTFRNPEKNSEWDNQEIDLTSALKNLFAHYHIDINGNIKEAISAQSDKTFFTELLHLLKLTLQMRNSITGTETDYLISPVADDNGYFYDSRTCNDTLPKNADANGAYNIARKGLMLIEQIKKAKDIANIKFDISNKSWLNFAQQKPYKDE

SEQ ID NO: 153 - protein, 1274 aa, unidentified
MIKEFEDFKRLYPIQKTLRFEAKPIGSTLEHLVKSGILDEDEHRAASYVRVKKLIDEYHKAFIDRVLNDGCLPFKNKGEKNSIEEYYESYTSKDKEEDSKKRFKEIQQNLRSIIVNKLTKDKAYANLFGNYLIESHKDKEDKKTMIDSDLIQFIKDADSLELGSMSKDEAIELVKEFWSFTTYFVGFYDNRKNMYSAEEKSTAIAYRLINENLPKFIDNMEAFKKIISRPEIQANTEQLYSDFAEYLNVESIQEMFQLDYYDILLTQKQIDVYNAIIGGKTDEKHDIKTKGINEYINLYNQQHKEDKLPKLKVLFKQILSDRNAISWLPEEFNSDQEMLISIKDCYEKLCVNVLGDKVLKSLLSSLDDYELEGIFLQNDQQLTNISQKIFGSWSVIQEAIIRNIKNTAPARKHKETEEDYEKRIFSIFKQAGSFSIKYIDDCLYDLDKNNINTIENYFATLGAENTPEIQRENLFALIKNAYTDVAGLLCSEYPTEKNLSQDENHVAKIKALLDAIKSLQHFVKPLLGNGDEHDKDERFYGELVSLWTELDTVTPLYNMVRNRITQKPYSQKKIKLNFENPQLLGGWDANKEKDYSCIILRREGMYYLAIMDKDSRKLLGKEMPSDGECYEKMVYKLLPGANKMLPKVFFAKSRIEEFMPSEQIIEKYNNGTHKKGKDFNITDCHNLIDYFKQSINKHEDWSKFGFTFSETSTYEDLSGFYREVEQQGYKLSFTNVSASYINSLVDEGKMYLFQIYNKDFSEYSKGTPNMHTLYWKALFDEQNLADVVYKLNGQAEIFYRKKSIDATHPTHPANRPVQNKNKDNKKKESLFEYDLIKDRRYSVDKFMFHVPITMNFKSNGSENINQQVKEYLQLANDTHIIGIDRGERHLLYLVVIDMHGNIKEQFSLNEIVNTYKGNIYHTNYHDLLEAREEERLKARQSWQTIENIKELKEGYLSQVVHKITQLMVKYHAIVVLEDLNMGFMRGRQKVEKQVYQKFEKMLIDKLNYLVNKQANITEAGGLLNAYQLTSKFDSFQKLGKQSGFLFYIPAWNTSKIDPVTGFVNLLDTRYQNVEKAKAFFSKFDAIRFNQDKDWFEFNLDYNKFGEKAEGTRTRWTLCTQGKRIYTFRNEDKNSQWDNIEIDLTSEMKSLLELYHIDIQGNLKEAINSQTDKSFFTKLIHLLKLTLQMRNSITRTETDYLISPVADEDGEFYDSRSCGPELPKNADANGAYNIARKGLMLIRQIKEAKELDKIKFDISNKAWLNFAQQKPYKND

SEQ ID NO: 154 - protein, 1319 aa, unidentified
MAKIFEDFKRLYPLSKTLRFDAKPVGATLDNIVKSGLLEEDEHRAASYVRVKKLIDEYHKVFIDRVLDNGCLPLENKGENNSLAEYYDSYVSKSQNEDAKKAFEENQQNLRSIIAKKLTGDKAYANLFGKNLIESYKDKKDKKKIIDSDLIQFINTADSTQLDSMTQVEAKELVKEFWGFVTYFYGFFDNRKNMYTAEKKSTGIAYRLINENLPKFIDNMEAFKKVIARPEIQANMEELYSDFSEYLNVESIQEMFQLDYYDMLLTQKQIDVYNAIIGGKTDDEHDVKIKGINEYINLYNQQHKDTRLPKLKALFKQILSDRNAISWLPEEFNSDQEVLNAIKDCYERLSENVLGDKVLKSLLGSLADYSLEGIFIRNDLQLTDISQKMFGNWGVIQNAIMQNIKHVAPARKHKESEEEYEKRIAGIFKKADSFSISYLNDCLNEADPNNAYFVENYFATFGAVNTPTMQRENLFALVQNKYTEVAALLHSDYPTAKHLAQDKANVAKIKALLDAIKSLQHFVKPLLGKGDESDKDERFYGELASLWAELETVTPLYNMIRNYMTRKPYSQKKIKLNFENPQLLDGWDANKEKDYATIILRRNGLYYLAIMGKDSKNLLGKAMPSDGECYEKMVYKQFDISKQLPKCTTELKHVRKALVEDAKRSCLLSDFNNWNKPLNVTRKLWELNNFVWDKKKEDWVLRKKDNETRPKKFHKKYLELTSDKKGYNQAKNDWIKFTKEFLSSYKKVEAYDIHYKKRYNSVDELYKQLNGDLYAISFTYVSASFIEQLVSEGKMYLFQIYNKDFSEYSKGTPNMHTLYWKALFDERNLADVVYKLNGQAEMFYRKKSIENTHPTHPANHPILNKNKDNKKKESLFDYDLIKDRRYTVDKFMFHVPITMNFKSSGSENINQDVKAYLRHADDMHIIGIDRGERHLLYLVVIDLQGNIKEQYSLNEIVNEYNGNTYHTNYHDLLDVREEERLKARQSWQTIENIKELKEGYLSQVIHKITQLMVKYHAIVVLEDLNMGFMRGRQKVEKQVYQKFEKMLIDKLNYLVDKKADASVSGGLLNAYQLTSKFDSFQKMGKQSGFLFYIPAWNTSKIDPVTGFVNLLDTRYQNVEKAKVFFSKFDAIRYNKDKDWFEFNLDYDKFGKKAEGTRTKWALCTRGMRIDTFRNKEKNSQWDNQEIDLTAEMKSLLEHYYIDIHGNLKDAISAQTDKAFFTGLLHILKLTLQMRNSITGTETDYLVSPVADENGIFYDSRSCGDELPENADANGAYNIARKGLMMIEQIKDAKDLNNLKFDISNKAWLNFAQQKPYKNG

SEQ ID NO: 155 - protein, 1319 aa, unidentified
MEFNDFKRLYPLSKTLRFEAKPIGDTLKNIIKNGLLEEDEHRAQSYVKVKKLIDEYHKVFIDRVLNDGCLTIENKGKKDSLEEYYESYMSKSNDENVSKTFKDIQENLRSVIANKLTKDKGYANLFGNKLIESYKDKDDTKKIIDSDLIQFINTAEPSNLDSMSQDEAKELVKEFWGFTTYFEGFHKNRKNMYTSEEKSTGIAYRLVNENLPKFIDNMEAFKKAIAKPEIQANMEELYSNFAEYLNVESIQEMFQLDYYNMLLTQKQIDVYNAIIGGKTDEDHDVKIKGINEYINLYNQQHKDEKLPKLKALFKQILSDRNAISWLPEEFNSDQEVLNAIKDCYERLSENVLGDKVLKSLLCSLSDYNLDGIFVRNDTQLTDISQKMFGNWSVIQNAIMQNIKKKKLARKRKESEEDYEKRIPDIFKKADSFSIQYINDSLNKMDDNNLHAVDEYFATLGAVNTPTMQHENLFALIQNAYTDISDLLDTPYPENKNLAQDKTNVAKVKALLDAIKSLQHFVKPLLGKGDESDKDERFYGELASLWTELDTVTLLFNMVHNYMTRKPYSQKKIKLNYKNTQLLAGWDANKEKEHAAIILRRNGMYYIAIMDKDSKNLLDKAMPSDGECYEKMVYKQFDISKQLPKCTTELKRVRKALIEDAKRSCLLSDSKDWNKPLNVTRKLWELNNYVWDKKKADWVLRKKENETRPKKFHKKYLELTSDKKGYNQAKNDWIKFTKEFLSSYKKVKDYDIHYKKRYNSVDELYKQLNSDFYTISFTYVSVSFIDKLVNEGKMYLFQIYNKDFSNYSKGTPNMHTLYWKALFDERNLADVVYKLNGEAEMFYRKKSINNTHPTHPANHPIQNKNKDNKKKESVFEYDLVKDYRYTEDKFLFHVPITMNFKSVGSENINQQVKEYLQQADDTHIIGIDRGERHLLYLVVIDMEGNIKEQFSLNEIVNEYNGNTYRTNYHDLLDVCADKRLKASQSWQTIENIKELKEGYLSQAIHKITQLMVKYHAVVVLEDLNKGFMRGRQKVEKQVYQKFEKMLIDKLNYLVDKKADAAQSGGLLNAYQLTSKFDSFQKLGKQSGFLFYIPAWNTSKIDPVTGFVNLFDTRYTNADKALKFFSKFDAIRYNEEKDWFEFEFDYDEFTQKAHGTRTKWTLCTYGMRLCSFKNPAKQYNWDSEVVALTDEFKRILGEAGIDIHENLKDAICNLEGKSQKYLEPLMQFMKLLLQLRNSRKNPEEDYILSPVADENGVFYDSRSCGDKLPENADANGAYNIARKGLMLIRQIKKAKELDKVKFDISNKAWLNFAQQKPYKNE

SEQ ID NO: 156 - protein, 1303 aa, unidentified
MEFNDFKRLYPLSKTLRFEAKPIGSTLNNIIKSGLLEEDEHRAQSYVKVKKLIDEYHKVFIDRVLDDGCLTIENKDKKDSLEEYYESYMSKSNDENVSKTFKEIQENLRSVIAKKLTDDKAYANLFGKNLIESYKDKDDKNKIIDSDLIQFINTAEPSQLDSMSQDEAKELVKEFWGFTTYFVGFFDNRKNMYTSEEKSTGIAYRLVNENLPKFIDNMEAFKKAIAKPEIQANMGELYSNFAEYLNVESIQEMFQLDYYNMLLTQKQIDVYNAIIGGKTDEEHDVKIKGINEYINLYNQQHKDEKLPKLKALFKQILSDRNAISWLPEEFNSDKEVLNAIKDCYERLSENVLGDKVLKSLLCSLSDYNLNGIFVRNDLQLTDISQKMFGNWSVIQNAIMQNIKNVAPARKRKESEEDYEKRISDIFKKADSFSIQYINDCLNEMDDNNLHAVDGYFATLGAVNTPTMQRENLFALIQNAYTDISNLLDTPYPENKNLAQDKTNVAKVKALLDAIKSLQHFVKPLLGMGDESDKDERFYGELASLWTELDTVTPLYNMIRNYMTRKPYSEKKIKLNFENPQLLGGWDANKEKDYATIILRRNGMYYLAIMNKDSKKLLGKTMPSDGECYEKMVYKFFKDVTTMIPKCSTQLKDVQAYFKVNTDDFVLNSKAFNKPLTITKEVFDLNNVLYGKFKKFQKGYLSATGDTAGYTHAVNVWINFCMDFLNSYESTCMYDFTSLKSESYLSLDAFYQDANLLLYKLSFTNVSVSFIDKLVDEGKMYLFQIYNKDFSDYSKGTPNMHTLYWKALFDERNLVDVVYKLNGQAEMFYRKKSIDYTHPTHPANHPIQNKNKDNKKKESVFEYDLVKDRRYTVDKFLFHVPITMNFKSVGSENINQQVREYLQQADDTHIIGIDRGERHLLYLVVIDMQGNIKEQFTLNEIVNEYNGNTYRTNYHDLLDTREEERLTARQSWQTIENIKELKEGYLSQVIHKITQLMVKYHAVVVLEDLNKGFMRGRQKVEKQVYQKFEKMLIDKLNYLVDKKADATQSGGLLNAYQLKSKFDSFQKLGKQSGFLFYIPAWNTSKIDPVTGFVNLLDTRYQNTEKAKAFFSKFDAIRYNADKDWFEFNLDYDKFGTKAEGTRTTWTLCTQGNRICTFRNAEKNSQWDNQEIDLTREMKSLFEHYHINICGNLKEEICSQTDKAFFTGLLHILKLTLQMRNSITGTETDYLVSPVADENGVFYDSRSCGDMLPKNADANGAYNIARKGLMLIGQIKETKDLANFKYDISNKAWLNFAQQKPYKNE

SEQ ID NO: 157 - protein, 1274 aa, unidentified
MDKKFEDFKRLYPLSKTLRFEAKPIGSTLDNIIKSGLLDEDEHRAVSYVKVKKLIDEYHKSFIDRVLDEGCLPFENNGEKDSLEEYYESYKLKSNDENANKTFKEIQQNLRSVIANKLTDDKAYANLFGNKLIESYKDKEDKKKTIDSDLIQFINTAEPSQLDSMSQDEAKELVKEFWGFTTYFVGFFDNRKNMYTSEEKSTGIAYRLVNENLPKFIDNMEAFKKVIAKSEIQANIEELYSNFAEYLNVESIQEMFQLDYYNMLLTQKQIDVYNAIIGGKTDEKHDVKIKGINEYINLYNQQHKDEKLPKLKALFKQILSDRNAISWLPEEFNDDQEVLNAIKDCYERLSENVLGNKVLKSLLCSLADYNLDDIFIRNDLQLTDISQKMFGNWSVIQDAIIQNIKNVAPARKRKESEEDYEKRISGIFKKADSFSILYINSCLNEMDDNSLHAVDGYFATLGAVNTPTMQRENLFALIQNAYTDISDLLNTKYPANKNLAQDKTNVAKVKALLDAIKSLQHFVKPLLGKGDESDKDERFYGELASLWTELDTVTPLYNMIRNYMTRKPYSEKKIKLNFENPQLLGGWDANKEKDYSTIILRRNGMYYLAIMNKDSRRLLGKAMPSDGECYEKMVYKLLPGANKMLPKVFFAKSRIDDFKPNIQIVENYNNGTHKKRKNFNIQDCHDLIDFFKQSIKKHEDWSKFSFNFSDTSTYEDLSGFYREVEQQGYKLSFMNVSVSFIDKLVDEGKMYLFQIYNKDFSEYSKGTPNMHTLYWKALFDERNLADVVYKLNGQAEMFYRKKSIDYTHPTHPANHPILNKNKDNKKKESLFEYDLIKDRRYTVDKFLFHVPITMNFKSVGSENINQQVREYLQQADDTHIIGIDRGERHLLYLVVIDMQGNIKEQFTLNEIVNEYNGNTYRTNYHDLLDIREEERLAARQSWQTIENIKELKEGYLSQVIHKITQLMVKYHAIVVLEDLNMGFMRGRQKVEKQVYQKFEKMLIDKLNYLVDKKADATQPGGILNAYQLTSKFDSFQKLGKQSGFLFYIPAWNTSKIDSVTGFVNLLDTRYQNTEKAKVFFSKFDAIRYNEEKDWFEFYLDYDKFGSKAEGTRTKWTLCTQGKRIRTFRNPDKNSQWDNQEVDLTREMKSLFEHYHINICGNLKEEICSQTDKAFFTGLLHVLKLTLQMRNSITGTETDYLVSPVADEEGNFYDSRYCNITLPKNADANGAYNIARKGLMLVKQIKAATDLANFKYDISNKAWLNFAQQKPYKNE

SEQ ID NO: 158 - protein, 1251 aa, unidentified
MKKSSLQDFTNQYSLSKTLRFELIPQGETLEHIEKNGLLSQDEHRAESYIIVKKIIDEYHKAFITKALDGVKLNSLEDYFLYYQLPKRDEEQKKKFEEIQTKLRKQIADRFAKQESFKNLFAKELIKDDLINFVKSNDDKLLVAEFQNFTTYFTGFHENRKNMYSAEDKSTAIAFRLIHQNLPKFIDNMRAFDKIKISKVKDSFKTILADDELGAIIQVIAVEDVFTLNYFNDTLTQLGIDKYNQLIGGFTSEDGKIKIKGLNEYINLYNQTAKKEERLPKLKPLYKQILSDRSTASFIPEAFSNDNEVLESIEKLYQEINDLVLNKRVKGEHSLKELLQSLNEYDVSKVYLRNDLSLTDISQKMFGDWGVFQKGMQTWYAVNYKGKNKAGTEKYEDEQKKYFSNQDSYSIGFINECLLLLDTVYQKRIEDYFKLLGERNTEEEKSENLFVLIEKNYNGIKDLLNNPYPHDKNLAQDQANVDKIKNFLDVVKTLQWFIKPLLGKGNEAEKDERFYGEFTSLWTTLDQVTPLYNKVRNYMTQKPYSTEKIKLNFENSTLLDGWDVNKEVDNTAMIFRKNGLYYLGIMNKKHNKIFKTDIANTGGECYEKMEYKLLPGANKMLPKVFFSNSRIDEFKPGTELLENYKNETHKKGDNFNLNDCHHLIDFFKTSINKHEDWKHFGFQFSDTKTYNDLSGFYREVEQQGYKITYKAISENYIAQMIAEGKLYLFQIYNKDFSPYSKGMPNMHTLYWKMLFDAVNLKNVVYKLNGQAEVFYRKLSIKAENIITHKANVPIHNKNEENEKKQQSRFDYDIIKDKRYTMDKFQFHVPITMNFKAKGLNNINIEVNQYLKKESDIHIIGIDRGERHLLYLTLIDGKGNIKQQFSLNEIINEYQGKTYKTNYHDLLDKKEGDRDDARRNWKTIETIKELKEGYLSQVIHKISELMVEHNAIVVLEDLNMGFMRGRQKVEKQVYQKFEKMLIDKLNYLVDKKKNPTDLGGTLNAYQLTNKFESFQKMGKQSGFLFYVPAWNTSKMDPVTGFVNLLDTRYENIEKAKTFFSKFDSIHYNPLKKYVEFECDYNRFTTKAEGTQTKWTLCTYKERIETFRDPTQNSQWKSREIVLTDEFISLFEQYGIAYKNKEELKDAIARQTEKVFFERLLHLLKLTLQMRNSITGTETDYLISPVANAKGEFYDSRTASETLPKNADANGAYNIARKGLWVVEQIKQADDLKKLKLAISNKEWLGFVQNYGK

SEQ ID NO: 159 - protein, 1267 aa, unidentified
MGWRNGFQKILILINNKKMGNTNLFKGFTNFYPVSKTLRFELKPIGKTLEHIEKNGLLLQDEHRAESYVTVKKIIDEYHKAFIAKALDGLVLNVLEDYHLYYQLPKRDEAQNKKFEELQTEMRKQIADRFTKQDGFKNLFAKELIKEDLKAFVQTLEDRQLVEEFGNFTTYFTGFHENRKNMYSAEDKSTAIAYRLIHQNLPKFVDNMKAFDKIRNSAVKEKFALIISDDELGPIIQVKDIEEVFCLDYFNETLTQKGIDKYNQLIGGYMPEDGKEKKKGLNEYINLFNQTAKKEERIPKLKPLYKQILSDRSTASFIPEEFECDNEVLESIEKLYQEINKHALPQLKGLMNNLHDFDLHKIYLRNDLSLTDISQKMLGDWGAFQKAMNKWFDLNYKGKAKPGTEKYEEEQKKYFRNHESYSIGFINDCLAKSDIAEHHKKIEDYFKRAGEQINETENLFTLVEKGYSTVNDLLNNPYPKEKNLSQDQQNVDKIKAFLDGIKALQWFIKPLLGKGNEAEKDERFYGEFAMLWTTLDQITPLYNKVRNYMTQKPYSTEKIKLNFENSYFLNGWAQDYESKAGLIFIKDGNYYLGINNKKLTIEEKELLKGTDAKRIILDFQKPDNKNIPRLFIRSKGDNFAPAVEKYNLPIKDVIEIYDSGKFKTDYRKTNEEDYTKSLHKLIDYFKEGFSKHESYKHYPFSWKSTTEYKDIAEFYNDVEVSCYQVFEEGVNWGKIMDFVDQGKLYLFQIYNKDFSPYSKGTPNMHTLYWKMLFDAENLKDVVYKLNGQAEVFFRKSSIKAENKVVHKAEGSIPNKNELNAKKQSTFDYDIIKDRRYTTDKFQFHVPITMNFKARGLNNINTEVNQLIKKENEIHIIGIDRGERHLLYLTLIDSKGSIKQQFSLNEIINQYNGQNYKTNYHNLLDKKEGGRDEARRNWKTIETIKELKEGYLSQVIHKIAELMVEYNAIVVLEDLNMGFMRGRQKVEKQVYQKFEKMLIDKLNYLVDKKKKAGEFGGTLKAYQLTNKFESFQKMGKQSGLLYYVPAWNTSKMDPVTGFVNLLDTRYENMEKAKQFFGKFEAISYKQTKGYFEFEFDYMKYTNKAEGTKTRWTLCTNNERIETYRNPEKNSQWDSREVGLTKEFVSLFEQFGINFKDNAGLKEAICRQTEKAFYERLLHLLKLTLQMRNSITGTEIDYLISPVANDKGEFYDSRTAAEILPQNADANGAYNIARKGLWVIDQIKQADDLKKLKLAISNKEWLGFVQKDV

SEQ ID NO: 160 - protein, 1253 aa, unidentified
MKNLTEFTGLYPVSKTLRFELKPQGRTLEYIEKNGLLEQDEHRASSYILVKKIIDDYHKAFIANALRDFKLYSLEDYYLYYNIQKRDDEQKKKFEDIQSKLRKQIADRFTKEESFKNLFAKELIKENLIEFVQTVEDRELIKEFESFTTYFTGFHENRKNMYSAEEKSTAIAYRLIHQNLPKFIDNMRVFEKIANSPVKDKFQTILSDNQLGPVIQVMAVEDMFRLDYFNETLTQIGIDKYNSLCGGFSPNEGKEKIQGLNEYINLYNQTAKKEERIPKLKPLFKQILSDRSTASFIPDEFENDSEVLESIELFYQEVNEQVINKNVEGEHSLKELLKSLPEYELTKIYLRNDLSITDISQKIFGDWGVFQKAMNTWFELNYNGKAKFGTEKYEEEQRKYFANLDSFSIGFINECLLQLDTPYHKNIADYFALRGKTDTETQDLFAVLEDKYNAVTDLLNNPYPQDQDLAQDQKQVDKLKELLDAVKAIQWFIKPLLGKGNEADKDERFYGEFTSLWITLDQITPLYNKVRNYMTRKPYSTDKIKLNFENSYFLNGWAQDYESKAGLIFTKDGNYYLGINDKKLSNEDKTLLKSNSELNLAKRIVLDFQKPDNKNIPRLFIRSKGNNFAPAVEKYNLPIHEVIEIYDNGKFKTEYRKINETDYLKSLHLLIDYFKIGFSKHESYKHYPFSWKNTTEYKDIAEFYHDVEVSCYQVFEENVNWDTLMNFVDEGKLYLFQLYNKDFSPNSKGTPNLHTLYWKMLFDADNLKDVVYKLNGQAEVFFRKSSIKPENIVLHKANEAVNNKNEQNTKKQSRFEYDIIKDKRYTVDKFQFHVPITMNFKARGLNNINTEVNQWLQKSDNVHIIGIDRGERHLLYLTLIDSKGNIKQQFSLNEIVNEYEGKTYKTDYHKLLDNREGNRDEARKNWKTIETIKELKEGYLSQVIHKISELMVEYNAIVVLEDLNMGFMRGRQKVEKQVYQKFEKMLIDKLNYLVDKKQNPAEMGGTLHAYQFTNKFESFQKMGKQSGMLFYVPAWNTSKMDPVTGFVNLFDTRYENMEKARSFIGKFDTIRYNPKKEYFEFDFDYNKFTAKAEGTRTRWTLCTNDTRIETFRNPAKNSQWDNREIILSDEFINLFKLYNIDYQNSDLKVQICKQTEKAFFERLLHLLKLTLQMRNSMTGTEVDYLISPVTNSRGEFYDSRTASDILPKNADANGAYNIARKGMWVIEQIRKATDFRKLKLAISNKEWLSFVQH

SEQ ID NO: 161 - protein, 1258 aa, unidentified
MKRFTNLYQLSKTLRFELKPIGKTLENIEKHGLLEQDTHRAESYVKVKDIIDEYHKAFIEEYLNTFADSSETYAEQNKNFVKLLQELYTNYMCKTKDETQQKLLTESQAKLRKIIAKSFNNDKYKRLFGKELIKEELIDFLKDDVEDITLVQEFKDFTTYFTGFHENRKNMYSDEDKSTAIAYRLIHENLPRFIDNILVFEKIAQSDVAQKFTELYKNFQSYLNVKEISEMFKLGYYNMVLTQTQIDVYNAIIGGKTIEDNDIKIKGLNEYINLYNQQQEDKHNRLPKLKPLYKQILSDRNAISWLPEQFDANEKGGKVLEAIQKAYNELEQQILNNSNEAEHSLPELLKLLSNYDLNKIYIPNDAQLTDISQKVYGHWNIISKALIEDLKLTTPRKSRKETDEKYEERLNKILKSQSSFSIRKITDSVHNTYPEIKSSIITYFENIGNIDNEEENIISKITNSYNIAKDLLNTPYLGNNLSQDTVNVEKIKNLLDAIKDLQHFIKPLLGKGDESEKDEKFYGEFTLLWDELNNITPLYNMVRNYMTRKPYSTEKIKLNFENSTLLDGWDLNKETDNTSVILRKDGMYYLAIMNKKHNRVFNIDSIPTEGDCFEKMEYKLLPGANKMLPKVFFSKSRIDEFAPSKQLIEKYQSGTHKKGDNFSLIDCHNLINFFKDSINKHEDWKKFNFNFSDTNTYEDLSNFYREVEKQGYKISFRNVSSEYINSLVEDGKIYLFQIYNKDFSSYSKGTPNMHTLYWKMLFDETNMSDVCYKLNGQAEIFFRKSSIKAEHPTHPANQPIENKNTLSNKKQSVFTYDLIKDKRYTIDKFHFHVPITMNFKGIGINNINNIVNQFIQEQEDLHIIGIDRGERHLLYLTVIDLQGNIKEQYSLNEIINNYNGNTYKTNYHDLLEKREKERMDARQSWKSIESIKELKEGYLSQVIHKITKLMIKYNAIVVLEDLNIGFMRGRQKVEASVYQKFEKMLIDKLNYLVDKKKQPEELGGTLNALQLTNKFESFQKLGKQSGFLFYTQAWNTSKIDPVTGFVNLFDTRYETREKAKEFFKKFDSICYNSEKDWFEFSFDYNNFTTKAEGTRTNWTLCTYGKRIETFRDEKQNSQWASNEINLTDKFKEFFAKYNIDINANLKESITAQESADFFKGILALLKLTLQMRNSMTGTDVDYLQSPVADNNGVFFNSQECDNSLPQNADANGAYNIARKGLWIVNKIKISNDLSNLNFAISNKEWLQFAQEKPYLLND

SEQ ID NO: 162 - protein, 1250 aa, unidentified
MASLKKFTRLYPLSKTLRFELIPLGLTADHIGKSGILSQDEHRAESYKKVKKIIDEYHKAFIEKVLNNIHLQYDNIEQNNSLEEYFLYYMIKNKDEKKEKIFEEIQKKLRKQIADRFIDDPSFKNIDKKELIRSDLKDFVCSQEDLQLVDEFKDFTTYFTGFHENRKNMYSSEAQSTAIAFRLIHENLPKFIDNIQVFNKVAASSVSEFFTELYANFEECLTVTEIAEMFKLEYFNSVLTQKQIDVYNFILGGKSIEGGSKIKGLNEYINLYNQQQKDKSKRLPKFKPLFKEILSDRNSISWLPEKFKSDEEVLETIEKAYQELNEHVLNRNVGGEHSLKELLVRLEDFNLDKIYVRNDQQLTDISQKIFGHWGTISKALLEELKNEVPKKSNKETDEAYEERLNKILKSQGSVSIALINNSIQKLNIEEKKTVNSYFSLNSNICPKDNLYTRIENAYLEVKDLLNTPYTGKNLAQDKLNVEKIKNLLDAIKSLQHFVKPLLGDGKEPEKDEKFYGEFLSLWEELDKITPLYNMVRNYMTQKPYSTEKIKINFENSTLMDGWDVNKERDNTSVILRKDGLYYLAIMNKKNNQVFDAHNTPSNGICYEKMEYKLLPGANKMLPKVFFSKSRIHEFAPSKKLIENYKNETHKKGTTFNLDDCHKLIDFFKTSIKKHEDWNRFEFKFSDTTTYEDLSGFYKEVEQQGYKISFRNVSADYIDNLVKEGKIYLFQIYNKDFSPYSKGTPNLHTLYWKMIFDERNLANVVYKLNGQAEVFFRKSSISYDKPTHPANQEIDNKNILNKKKQSIFSYDLIKDKRYTVDKFQFHVPITMNFKSTGQDNINLSVNEYIRQSDDLHIIGIDRGERHLLYLTVIDLEGRIKEQYSLNEIVNIYNGNEYHTNYHDLLSKREDEREKARQSWQTIENIKDLKEGYLSQVIHKISELMIKYNAIVVLEDLNIGFMRGRQKVEASVYQKFEKMLIDKLNYLANKKIDPEEEGGILNAYQLTNKFTSFQKIGKQSGFLFYTQAWNTSKIDPSTGFVNLFDTRYETREKSKMFFSKFDSIKYNKDKDWFEFIFDYTNFTTKAEGTRTQWTICSYGKRIETLRDENKNSNWVSTEIDLTQSFKNFFTKYGIDINDNLKEFIVQQDTSEFFKGILYLFKLTLQMRNSAIGKDIDYIISPIADEKGIFYNSNECDSSLPKNADANGAYNIARKGLYIVRKIKHSDELKNLNLAITNKEWLQFAQSKPYINK

SEQ ID NO: 163 - protein, 1287 aa, unidentified
MKKLNAFSRIYPLSKTLRFELRPIGKTLEHIEKSGILSQDQHRAESYVEVKKIIDEYHKAFIENVLKDFRFSENRGEKNSLEEFLVYYMCKSKDETQKRQFADIQDKLRKQIAKRFSDDDRFKRIDKKELIKEDLLSFVEDVEKRQLIEEFKDFTTYFTGFHENRKNMYTDEAQSTAIAYRLIHENLPKFIDNIMVFDKVAASPIAKYFAELYSDFEEYLNVSELGEMFRLDYYNIVLTQTQIDVYNAVVGGRTLDDGTKIQGLNEYINLYNQQQKDKSARLPKLKPLYKQILSDRNAISWLPEQFQSDEKVLEAILKAYQELDEQVLNRKKEGEHSLKELLLSLSNYDLTKIYIRNDTQMTDISQKAFGHWDVIPKALLEQLKKEVQKKSKESEEAYEERLNKIIKSQGSIPIALINQGVQKQNSEEQNTLQTYFASLGAVETESVKKENLFTQIENAYAEVKDLLNTPYSGKNLAQDNVAVEKIKTLLDAIKALQHFVKPLLGDGTESEKDEKFYGEFSMLWEELDKITPLYNMVRNYMTRKPYSTEKIKLNFENSTLMNGWDLNKEQDNTTVILRKDGIYYLAIMDKKHKKVFDEKNILGSGECFEKMEYKFFKDLTTMVPKCTTQLKVVKEHFLTHSEPYTISKDVFYSKFEITKEEYELNNVLYNGKKKFQKDYLRQTGDEKGYKDALTKWIRFCLRFLAQYKSTMIYDISSFQVDCKINSYTSIDEFYSEINLYLYNITFRNVSVDYINSLVEEGKIYLFQIYNKDFSPYSKGTPNLHTLYWKMLFDEKNLADVVYKLNGQAEVFYRKSSIICERPTHPANQAINNKNVLNKKKHSTFVYDLVKDKRYTVDKFQFHVPITMNFKSTGGDNINLLVNEYIQQSDDLHIIGIDRGERHLLYLTVIDLQGRIKEQYSLNEIVNTYNGNEYRTNYHDLLSKREDERMKARQSWQTIENIKELKEGYLSQVIHKISELIVKYNAIVVLEDLNMGFMRGRQKVESSVYQKFEKMLIDKLNYLVDKKKNPEEDGGVLNAYQLTNKFESFQKVGKQSGFLFYTQAWNTSKIDPVTGFVNLFDTRYETREKAKDFFGKFDAIRYNTAKDWFEFAFDYSNFTSKAEGSRTNWTLCTYGERIEKFRDEKQNSNWASRGINLTDKFKELFAEYKIDIQTDLKEVISRQDSADFFKRLLYLLKLTLQMRNSETGTEVDYMQSPVADANGNFYNSETCDDSLPKNADANGAYNIARKGLWIVQQIKATDDLKNVKLSISNKEWLKFAQEKPYLNE

SEQ ID NO: 164 - protein, 1255 aa, unidentified
MKKLNAFSRIYPLSKTLRFELRPIGKTLEHIEKSGILSQDQHRAESYVEVKKIIDEYHKAFIENVLKDFRFSENRGEKNSLEEFLVYYMCKSKDEMQKRQFADIQDKLRKQITQRFSDDDRFKRIDKKELIKEDLLSFVEDVEKRQLIEEFKDFTTYFTGFHENRKNMYTDEAQSTAIAYRLIHENLPKFIDNIMVFDKVAASPIAEHFAKLYSDFEEYLNVSELGEMFRLDYYNIVLTQTQIDVYNAIVGGKTLEDGKKIQGLNEYINLYNQQQKDKSARLPKLKPLYKQILSDRNAISWLPEQFQSDEKVLEAIQKAYQDLEEQVFNRKKEGEHSLKDLLLSLSDYDLSKIYIRNDTQMTDISQKAFGHWDVIHKALLEQLKEDVQKKPKKESDEAYEERLNKIIKSQGSIPIALINQGVQKQNSEEQNTLQTYFASLGAVETESVKKENLFTQIENAYAEVKDLLNTPYSGKNLAQDNVAIEKIKTLLDTIKALQHFVKPLLGDGTESEKDEKFYGEFSMLWEELDKITPLYNMVRNYMTRKPYSTEKIKLNFENSTLMNGWDLNKEQDNTTVILRKDGMYYLAIMNKKHNRVFDVKNISKNGECFEKMEYKLLPGANKMLPKVFFSKSRIDEFAPSEQLLENYNKGTHKKGNLFNLSDCHALIDFFKASINKHKDWSKFGFKFSDTNTYEDLSGFYREVEQQGYNISFRNVSVDYINSLVEEGKIYLFQIYNKDFSPYSKGTPNLHTLYWKMLFDEKNLADVVYKLNGQAEVFFRKSSIICDKPTHPANQPIDNKNALNNKQQSVFEYDLVKDKRYTVDKFQFHVPITMNFKSTGGDNINLLVNEYIRQSDDLHIIGIDRGERHLLYLTVIDLQGRIKDKEQYSLNKIVNTYNGDEYPTNYHDLLSKREDERMKARQSWQTIENIKELKEGYLSQVIHKISELIVKYNAIVVLEDLNMGFMRGRQKVESSVYQKFEKMLIDKLNYLVDKKKNPEEDGGVLNAYQLTNKFDSFQKLGKQSGFLFYTQAWNTSKIDPVTGFVNLFDTRYETREKAKDFFGKFDAIRYNTAKDWFEFAFDYSNFTSKAEGSRTNWTLCTYGERIEKFRDEKQNSNWASQGINLTDKFKELFAKYKIDIQADLKEAISQQDSADFFKGLLYLLKLTLQMRNSEIGTEIDYMQSPVADANGNFYNSDTCDDSLPKNADANGAYNIARKGLWIVQQIKAADDLKNVKLSISNKEWLKFAQEKPYLNE

SEQ ID NO: 165 - protein, 1257 aa, unidentified
MFIMTSLKRFTRVYPLSKTLRFELKPVGKTLDHIVSSGLLEQDQHRAGSYVEVKKIIDEYHKAFIESSLDDFELQYYNEGKNNSLEEFYSYYMCRSKDETQKKLFEENQDKLRKQIADRLSKDERFKRIDKKELIEKDLIDFVKKPEERQLLEEFKGFTTYFTGFHENRKNMYSAEAQSTAIAYRLIHENLPKFIDNIMVFDKVAASPVADSFAELYANFEEYLNVTEIAEMFNLAYYNVVLTQSQIDVYNAIIGGKTFENGVKIKGLNEYINLYSQQQKDKSARLPKLKPLYKQILSDRNAISWLPEYFSEDEKLLEAIQKSYQELDEQVFNRKREGEHSLKELLLGLEGFDLSKIYIRNDLQLTDISQKVYGSWSVIQKALLEELKGEVQKKSKKETDEAYEDRLNKILKSQGSISIALINDCVHKLNSEEQNTIQGYFATLGAVDNQILQKENLFVQIENAYTEIKDLLNTPYQGRNLAQDKVNVEKIKNLLDSIKSLQHFVKPLLGDGSEAEKDEKFYGEFVALWDELDKITPLYNMVRNYMTRKPYSTEKIKLNFENSTLMDGWDLNKEQANTTVILRKDGLYYLAIMNKKNNKVFDVKNISSKGECYEKMEYKLLPGANKMLPKVFFSKSRIHEFAPSEQLLENYNNETHKKGATFNLSDCHALIDFFKASINKHEDWSKFGFNFSDTSSYEDLSGFYREVEQQGYKISFRNVSVDYVDSLVEEGKIYLFQIYNKDFSLYSKGTPNLHTLYWKMLFDEKNLADVVYKLNGQAEVFFRKSSINYERPTHPANQPIDNKNPQNEKKQSVFNYDLIKDKRYTVDKFQFHVPITMNFKSTGSENINQSVNEHIQKSDDLHIIGIDRGERHLLYITVIDLKGRIKEQFSLNEIVNHYNGKNHCTDYHALLSKREEERMKARQSWQTIESIKELKEGYLSQVVHKISELMVKYNAIVVLEDLNMGFMRGRQKVEASVYQKFEKMLIDKLNYLADKKKGPEEEGGILNAYQLTNKFVSFQKMGKQSGFLFYVPAWNTSKIDPVTGFVNLFDTRYETREKAKAFFAKFESIRYNEDKDWFEFAFDYSKFTSKADGSCTKWTVCTYGKRIETFRDEKQNSNWVSKEVCLTEKFKDFFAKYGIELRSNLKEYIISQDSADFFKGLLSLLKLTLQMRNSETGTDVDYLQSPVADANGEFYNSENCDESLPENADANGAYNIARKGLWVVKQIKGADDLKNLKLAISNKEWLQFVQAKPYLND

SEQ ID NO: 166 - protein, 1262 aa, unidentified
MKTFQQFSRVYPLSKTLRFELKPIGSTLEHINKNGLLDQDQHRAKSYIQMKNIIDEYHKEFIEDVLDDLELQYDNEGRNNSISEFYTCYMIKSKDDNQRKLYEKIQEELRKQIANAFNKSDIYKRIFSEKLIKEDLKNFITNQKDNDKREQDIQIIEEFKNFTTYFTGFHENRKNMYTSEAQSTAIAYRLIHENLPKFIDNIMVFDKVAASPIADSFSELYTNFEECLNVMSIEEMFKLNYFNVVLTQKQIDVYNAIIGGKTIDNTNIKIKGLNEYINLYNQQQKDKSARLPKLKPLYKQILSDRNAISWLPEQFESDDKLLEAIQKAYQELDEQVLNRKIEGEHSLRELLVGLADYDLSKIYIRNDLQLTDISQKVFGHWGVISKALLEELKNEVPKKSKKESDEAYEDRLNKVIKSQGSISIAFINDCINKQLPEKQKTIQGYFAELGAVNNETIQKENLFAQIENAYTEVKDLLNTPYTGKNLAQDKVNVEKIKNLLDAIKALQHFIKPLLGDGTEPEKDEKFYGEFAALWEELDKITPLYNMVRNYMTRKPYSTEKIKLNFENSTLMDGWDLNKEQANTTVILRKDGLYYLAIMNKKHNRVFDVKAMPDDGDCYEKMEYKLLPGANKMLPKVFFSKSRIQEFAPSSQLLENYHNDTHKKGVTFNIKDCHALIDFFKASINKHEDWCKFGFRFSPTETYEDLSGFYREVEQQGYKISFRNVSVDYIHSLVEEGKIFLFQIYNKDFSPYSKGTPNLHTLYWKMLFDEKNLADVVYKLNGQAEVFFRKSSINYEQPTHPANKAIDNKNELNKKKQSLFTYDLIKDKRYTIDKFQFHVPITMNFKSTGNDNINQSVNEYIQQSDDLHIIGIDRGERHLLYLTVINLKGEIKEQYSLNEIVNTYKGNEYRTDYHDLLSKREDERMKARQSWQTIENIKELKEGYLSQVVHKIAELMIKYNAIVVLEDLNAGFMRGRQKVESSVYQKFEKMLIDKLNYLADKKKQPEEPGGILNAYQLTNKFVSFQKMGKQCGFLFYTQAWNTSKIDPVTGFVNLFDTRYETREKAKTFFGKFDSIRYNDEKDWFEFAFDYTNFTSKADGSRTNWKLCTYGKRIETFRDEKQNSNWTSKEVVLTDKFKEFFKESNIDIHSNLKEAIMQQDSADFFKKLLYLLKLTLQMRNSETGTNVDYMQSPVADEEGNFYNSDTCDSSLPKNADANGAYNIARKGLWIVQQIKTSDDLRNLKLAITNKEWLQFAQRKPYLDE

SEQ ID NO: 167 - protein, 1255 aa, unidentified
MGTLKQFTRVYPLSKTLRFELKPIGRTLEFINSSGLLEQDQHRADSYIKVKGIIDEYHKAFIETVLNDFKLNYTDEGKKNSLEEFYTCYMCKAKDEAQKKLFEEIQGKLRKQIADCFSKDDKFKRIDKKELIKEDLVNFVTNQEDRLLIDEFRDFTTYFTGFHENRKNMYSAEAQSTAIAYRLIHENLPKFIDNMLVFDKVAASPVSEHFVGLYSNFEEYLNVMNIAEMFRLDYFNIVLTQKQIDIYNYIIGGRTLDDGTKIKGLNEYINLYNQQQKDKSVRLPKLKPLYKQILSDRNAISWLPEQFESDEKALEAIQKAYQELDEQVFNRNKEGEHSLKELLQTLAEYDLDKIYIRNDLQMTDISQKVFGHWGIISKALLEQLKKELPKKSKKETDEAYEERLNKVLKSQGSISIAQINNSVWVMGMEEQNSIQAYFARLGAVNTETVQQENIFSHIENAYTEVKDLLNTPYPLNKNLAQDKVNVEKIKNLLDAIKSLQHYVKPLLGDGTESEKDEKFYGEFVALWEDLDKITPLYNMVRNYMTRKPYSTEKIKLNFENSTLMDGWDLNKEQANTTVILRKDGLYYLAIMNKKHNRVFDVKNMPESGDCYEKMEYKLLPGANKMLPKVFFSKSRINEFAPSEQLMANYRNETHKKGASFNIHDCHALIDFFKSSINKHEDWSRFGFHFSDTNTYEDLSGFYREVEQQGYKISFRNVSVDYIHSLVEEGKIYLFQIYNKDFSPYSKGTPNLHTLYWNMMFDERNLADVVYKLNGQAEVFFRKSSITCERPTHPANQAIENKNALNEKKQSVFTYDLIKDRRYTVDKFQFHVPITMNFKSTGNDNINQSVNEYIQKCDDLHIIGIDRGERHLLYLTVIDMKGQIKEQYSLNEIVNTYKGNEYRTNYHELLSKREDERMKARQSWQTIENIKELKEGYLSQVIHKISELMVKYNAIVVLEDLNMGFMRGRQKVEASVYQKFEKMLIDKLNYLADKKKNPEEEGGILNAYQLTNKFTSFQKMGKQSGFLFYTQAWNTSKIDPVTGFVNLFDTRYETREKAKVFFCKFDSIRYNRDKDWFEFAFDYNKFTTKAEGTHTQWILCTYGKRMETFRDEKQNSQWTSQECGLTDKFKEFFAKYGIDIHTNLKEAIAQQDSADFFKGLLYLLKLTLQMRNSKTGTDIDYMQSPVADANGNFYNSELCDNSLPKNADANGAYNIARKGLWIVRQIKASDDLRNLKLTISNKEWLQFAQNKPYLND

SEQ ID NO: 168 - protein, 1293 aa, unidentified
MSTYSDFTGLYTLSKTLRFELKPIGKTKDNIERNGILDRDSQRAIGYKAIKKVIDEYHKAFIELMLDSFELKLKDEGRMDSLMEFYYLYHLPTIDSKRKDDLKKVQEALRKQISECFTKSEQYKRLFGKELIREDLADFIKTPKYEGVIRSQHDNEDLTEEEIRKIQEEVEKTIDQFYDFTTYFVGFYDNRKNMYVADDKATSIAHRMITKNLPKFIDNMDVFAKISSSEVATHFETLYKEMEAYLNVNSIEEMFQLDYFSMVLTQKQIDVYNSIIGGMVLENGTKIQGLNEYVNLYNQQQKDKGNRLPKLKPLFKQILSERNAISWLPEEFESDNDMLDGIERCYQDLKKQVFNGENSMQVLLKSIGDYDLEHIYLPNDLQLTDIAQKYYGSWSVIKKAMEEDVKANNPQKRNDTGEKYEERITKLLKSKESISIEEINRLMKWLLGDDYKPMENYFSMMGAEDDENGQKPDLFIRIENAYTEAKALLTSVYPEDRKLSQDKKNVERIKNLLDAIKDLQRFVKPLLGGGTESEKDPRFYGEFVPMWEALDQITPLYNMVRNRMTQKPYSEEKIKLNFDTPTLLKGWPDAQASSGAILKDNKGLYYLAILDSMHRTCLNELKSCPTEKSEMAIMKYLQGGDMEKNVQNLMRINGVTRKVNGRKEKEGAMVGQNIRLENAKNTYLPTEINDIRLKQSYLTSSQSFNKQDLALYIEYYMPLVREYYSDYQFSFRNPSEYKSFAEFTDHINQQAYQVQFGSISDKQLFQMVEEGKIYLFQIYNKDFSPYSKGTPNMHTLYWKMLFDERNLADVVYKLNGEAEVFFRKHSIEVGRPTHPANKPIENKNKLNEKKISVFAYDLLKDRRYTVDKFQFHVPITMNFKAAGLNNINPLVNAYLKESKATHIIGIDRGERHLLYLSLIDLQGNIVEQYSLNEIVNEYNGNTYRTNYHDLLDAKEKQRDEARKSWQTIENIKELKEGYMSHVIHKIAELMVKYNAVVVLEDLKPGFMRGRQKVEKQVYQKFEKMLIDKLNYLVDKKLEATEMGGVLNAYQLTNKFESFQKPGKQSGFLFYIPAWNTSKMDPTTGFVNLLDTRYENMAKAKAFFGKFKSIRYNATKDWFEFAFDYNNFHNRAEGTRTQWALCTYGTRIETKRDPKQNNSFVSEEFDLTSKFKKLLAHYAIDLNGNLLEQICSQNDTQFYKDLLHLLHLTLQMRNSITGTDVDYLVSPVMNVYGEFYDSRTCGNNLPKNADANGAYNIARKGLWIIEQIKQTEDLSKLKLAISNKEWMRYAQGLR

SEQ ID NO: 169 - protein, 1263 aa, unidentified
MKTLKNLTGLYSLSKTLRFELKPIGKTKENIEKNGILERDNERAIAYKAVKKVIDEYHKAFIELMLDDFELNKDTLNEFYYLYHLPTSEAKRKTDLPKVQEVLRKQISERFTKSEQFKRLFGKELIREDLVEFVKTPQYENIIRKMPGNEQLTDKEVKQIQERVQKDIAQFDDFTTYFSGFYDNRKNMYVPEDIATSIAHRMIGENLPKFIDNMDVFARIAASDVATHFDELNKAMELYLNVNEIPEMFQLDYFHMVLTQKQIDVYNAIIGGKVLDDGTKVQGLNEYVNLYNQQQKDKSKRLPKLKPLFKQILSERNAISWLPDEFDSDNEMLQSIGKCYHDLKEQVFGSLKTLLGSIKDYDLEHIYLPNDLQLTDIAQKHFGDWSVIKNAVIENLQSVNPKKKRENGENYDERILKLQKANDSYSIGFINALLRSKTDDFNPLENYFAGMGAEDNENGQKLNHFARIENAYTEVKTLLNADYPEGKSLSQDKANVEKIKNLLDSIKDLQHYVKPLLGSGMESDKDNRFYGEFTPLWEALDQITPLYNMVRNRMTQKPYSDEKIKLNFDNSTLLAGWDLNKEADNTCTLLRKDGNYYLAIINKRSNKVLKPENLISDGDCYEKMEYKLLPGANKMLPKVFFSKSRIDEFKPSESVLKNYQKETHKKGDNFNLDDCHALIDFFKESINKHEDWSKFGFHFSDTNSYEDLSGFYREVEQQGYKISFRNVSVNYINQLVDEGKIYLFQIYNKDFSPYSKGTPNMHTLYWRMLFDERNLADVVYKLNGEAEVFFRKHSIRVDKPTHPANKPIANKNAQNEKKESIFTYDLVKDRRYTVDKFQFHVPITMNFKAAGLNNINPLVNAYLKESNSTHIIGIDRGERHLLYLSLIDMKGNIVEQYTLNEIVNEYKGNTYRTNYHDLLDAKEKQRDEARRSWQTIENIKELKEGYMSQVIHKIAELMVKHNAIVVLEDLNMGFMRGRQKVEKQVYQKFEKMLIDKLNYLVDKKLDAEEMGGVLNAYQLTNKFEGFQKLGKQSGFLFYIPAWNTSKMDPTTGFVNLFDTRYENMEKSKVFFGKFDSIRYNSAKGWFEFAFDYGNFTAKAEGTRTNWTLCTYGTRIETKRNPEKNNEFDSVEIDLTEQFKALFAKHQIDLSGNLKEQICNQSDASFHKELLHLLHLTLQMRNSVTNSEVDFLLSPVMNASGEFYDSRTCGKNLPENADANGAYNIARKGLWIIEQIKNTNDNDLAKIKLAISNKEWLRYAQGLD

SEQ ID NO: 170 - protein, 1281 aa, unidentified
LKNKYYVCIFIKKTINSIINLKETNKMKKFSDFTNVYPVSKTLRFELKPIGKTQENLGKIIDEDNQRAKDYKVVKKVIDEYHKAVIEQLLNGFELDKDTLEKFKDLYHLSISEPKRKDLPKVQEVLREQISKRFIKSEQYKRLFGKELIQEDLPEFVYSSKYGDVIRKQHEKEHLSDDDINRERKRICDEIAQFDDFTSYFGGFHENRKNMYVADDKATSIAHRLINENLPKFVDNMDVFAKIAASDVAQHFDKLYKEMEPYLNVGAISEMFEIGYFSTVLTQKQIDVYNAIIGGKVEEDGRKIQGLNEYINLYNQQQKDKANRLPKLKPLFKQILSDRNAISWLPEEFESDNDMLQRIEECYQNLKEQVFDSLKTLLANIKEYDIAHIYLPNDLQLTDISQKHFGSWSVIKNAVIEKVKAENPQKKKESGEKYEERIAKELKHYDSLTIGFLNDLLKNQVGFTPIEMYFANMGAEDNENGQQVNHFVRIENAYTDICQLLSTEYKGDSLAQDKKNVEKIKNLLDAIKNLQHFVKPLLGKGNESEKDNRFYGEFTPLWEMLDQITPLYNMVRNRMTKKPYSEEKIKLNFENSQLLKGWDLNKEVANTCTMLRKDGNYYLVIMNKKHNTVLQPGKLVSDGDCYEKMEYKLLPGANKMLPKVFFSKSRIGEFNPSERIINNYNNNTHKKGDTFNLDDCHALIDFFKTSINKHEDWSKFDFKFSDTNTYSDLSGFYREVEQQGYKIAFRNVSVQYIDQLVDEGKIYLFQIYNKDFSPYSKGTPNMHTLYWRALFDEKNLANVVYKLNGEAEVFFRKHSLPYKPTHPANQPIANKNSQNKKKESTFAYDLIKDRRYTLDKFQLHVPITMNFKAAGINNINLMVKDYLKESDATHIIGIDRGERHLLYLSVINMKGEIVEQYSLNEIVNEYNGNTYRTNYHDLLDAKEKQRDEARRSWQTIENIKELKEGYMSQVVHKIAQLMVKYKAIVVLENLNMGFMRGRQKVEKQVYQKFEKMLIDKLNYLVDKQCAIDEEGGILHAYQLTNKFESFQKIGTQSGFLFYIPAWNTSKMDPTTGFVNLFDTRYENMEKARLFFAKFDSIRYNTNQNYIEFAFDYDNFTSKAEGTKTKWTLCTYGTRIETKRNPDKNNEFDSIELNLTEQFKALFTTYHIDITGNLKEQICNQNDATFYKGLLHLLHLTLQMRNSVTGTATDYLLSPVMNNKGEFFDSRKCGKNLPENADANGAYNIARKGLWVIEQIKQAEDLSNIDLAIKNKEWMQFAQKNR

SEQ ID NO: 171 - DNA, 3750 bp, unidentified
  source 1..3750: mol_type = other DNA
atggatatgaagtcactgaacagctttcagaaccaatattcactttcaaaaacgctgagatttcagcttattcctcaggggaaaacactggataatatcaacgagtcccgaatcctggaggaagaccaacaccgctctgagagctacaaactcgtgaagaaaataattgatgactaccacaaggcttacattgagcaagctctgggaagcttcgagttaaagattgcgtctgatagtaagaatgatagtctcgaggagttttactctcagtacatcgcggagagaaaggaagataaggcaaaaaagctgtttgagaaaactcaggataacctacggaagcagatttccaagaagctcaaacaaggagaggcatataagagactgttcgggaaagaactcattcaggaggatctcttggagttcgtcgccaccgaccccgaagcagactctaagaaacggctcattgaggagtttaaagactttaccacatactttatcggctttcacgagaataggaagaatatgtatgccgaagaggctcagtccacagccatcgcgtatcgaatcatccacgagaatctgccaaagtttattgataacattcgcaccttcgaggagctggccaagagctctattgctgacgttttaccccaggtgtatgaggattttaaggcatatctcaaagtggagtcagttaaggagctgttttctctagactatttcaataccgtacttacccagaaacagcttgatatatacaacgcagtgatcggtggcaaatcattggacgaaaactcacgcattcagggactgaatgagtatatcaacctgtataaccagcagcataaggataagaaattgccttttctgaagccactgtttaaacagattctgtccgacaggaatagcttaagctggctgccagaagcattcgacaatgataagcaggtccttcaggcagtgcatgattgctacacatccctgctagaaagtgttttccataaagacggcctgcagcagttactgcagagcctgcccacatataatctcaaaggcatctacttacggaacgatttgagcatgacaaatgtctcacagaagttgcttggcgactggggcgctataactcgcgccgtaaaagaaaagctgcaaaaggaaaaccccgctaaaaaacgtgaatcagatgaagcgtatcaggaacggatcaacaagatttttaaacaggccggaagttatagcttggactacatcaaccaggcactggaagccacagatcagaccaacatcaaggtggaagactactttattaatatgggcgtcgacaatgaacagaaggagccgttgttccaacgggtggcccaggcctataatcaagctagcgatctcctggaaaaggaatatcctgcaaacaaaaaccttatgcaagataaggagtcgatcgaacatatcaagtttctcctggataatctcaaggccgtgcagcattttatcaaacctttgttgggtgatgggaacgaagctgacaaggataaccggttctacggagagctaacggccctgtggaacgagttggaccaggtaaccagactctataacaaagtgagaaactacatgactagaaaaccctatagcgtcgacaagatcaagatcaatttcaagaactctacccttctaaatggttgggataggaataaagaacgagacaacactgccgtcatcctgcggaaagatgggaaattttacctagcaatcatgcataaggagcacaataaggtattcgaaaaattccccgtcggcacaaaggacagcgatttcgaaaagatggaatacaaactgctgcctggtgccaacaagatgctgcccaaggtgtttttctctaaatctcgcatcgacgaattcaagccttccgccgaactgctgcagaaataccagatgggcacacacaagaagggggaattattttcgctaaacgattgccattccctgatcgacttcttcaaggcttccatcgagaaacacgatgattggaagcagttcaattttcacttcagtccaacttccagctacgaagacctcagcggcttctatagagaggtggagcaacagggatacaaacttacttttaagagcgtggacgcggactacattaataagatggttgacgagggaaagatattccttttccagatctacaacaaagatttcagcgaacactccaaagggactcccaatctgcacaccctttattggaagatgctgtttgacgaaaggaatttgcagaacgtggtctataagcttaatggcgaagctgaggtctttttccggaaaaaaagtttaacctacacccggcccacccatcctaagaaggagccaattaagaacaagaatgtgcagaatgccaaaaaggagagcatcttcgactacgatctgatcaagaacaaaaggtttacggttgacagttttcagtttcacgtaccaattacaatgaacttcaagagtgagggacgttctaacctcaacgagagggtgaacgagttcctgcgacaaaataacgatgcccacataattgggattgatagaggggagcgccacttgctgtaccttgtcgttatcgacaggcatggtaatatcgtggagcagttctccctcaactccataattaacgagtaccaagggaatacctatgccactaattatcacgatttactggacaagcgtgaaaaggaaagggaggaggccagggagtcctggcagagtattgagaacatcaaagagctgaaagagggatacctctctcaagtggttcataaaatcgctgacttaatggtgaaataccatgctattgtcgtgctggaagatctgaacatgggcttcatgcgggggcgccagaaagttgaaaaacaagtgtaccagaaattcgagaaaatgctgattgacaagctaaactatttggtagacaaaaagcaggatgctgagacggacggcggactgctaaaagcatatcagctgacaaaccagtttgaatcatttcagaagctcggtaagcagtcgggcttcctgttctacgtgccagcctggaacacgtctaaaatcgatccgtgtaccggattcacgaacctcctggacactcgatacgagtcaatcgaaaaggcgaaaaagttttttcagaccttcaatgccattagatataatgcagcccaagggtacttcgagtttgaactcgactacaataagttcaataagagggctgacgggacacagaccctctggactctgtgtacctatgggccacgcatagagacactcaggtccaccgaggacaataacaaatggacttctaaagaggtggacctcaccgacgagctgaagaagcatttttaccactatggcattaagctggatgcagacctcaaagaagctataggtcagcagactgacaagccttttttcactaacttactccaccttttgaagctgacactccagatgcgcaattccaaaataggcaccgaagtcgactaccttatatcaccgatccgaaacgaggatggtactttctatgacagtagacaaggaaataagtcgctgcctgccaatgccgatgcgaatggagcctacaacatagctcgtaagggcttgtgggttatcaatcaaataaaacagacaccccaagatcaaaaaccgaagttggccattaccaataaggagtggcttcagttcgcacaagaaaaaccataccttaaggactga

SEQ ID NO: 172 - DNA, 3702 bp, unidentified
  source 1..3702: mol_type = other DNA
atggatcacttcaccaatctgtaccctgtgtcgaagaccctgagattcgagctgattccagacaagcgcaccaaggcaatcctggagcgcaccgacctgatcgcccaggatgagcatcgagctgagtcttataaactcgtgaagaagatcatcgatcggtatcataaaaagttcatcgacagtgtgctgggaactctgaaactgcctctggacgaactggactcactgcacgagctgtacagcaaatctcagaagtcagacgccgacaaaaaggccctcgagaagatccaggacaagctgcggaaactgatcgcagacgccctgactaaggattctaggtacaagaggatcgacaagaaagagctcatcagagaggacatcctgtctgtgatcgagcccgaggagcaagccctgatcgacgagttccgggacttcaccacatactttacaggctttcacgagaacaggaggaacatgtactccgctgaggcccagagcaccgctatcgcctatagactgatccacgagaacctgcctaagtttatcgacaacatggccacttttgagaagatcgcagcctctcccgtggccgagcacttcccacagctgtaccaggagatggcagaatatctgaacgtgcgggagatcggtgacctcttcaagctggattactacacagagctgctgacgcagagtcagatcgaggcttataacgcagtcatcggcggaaggactgtggaggagtctggaaagaagatccaggggatcaacgagtacgtgaacctgtacaatcagcagcagccctctagagacactcggctgcccaagctgaagcccctgtttaagcagattctgtctgatagggaggctgtgtcttggctgcctgaggagtttgagagcgataaagacatgctgaccgccgtgaaggagtgctaccacagcctgaacgatcacgtgtttgatcctctgcgcgagctgctgacaaacctgtctagttacaatctggacggcatctacatccccaacgatctgagcctgacagacattagtcaggccatgttcaaggattggtctgtgatcaaaaaggccatcgccgaagacgtgaaaaggaactgcccactgaaaaggaacgaaaaggccgacaattatgaggagaggattagtaagctgatcaagagagaaaacagcttctccattgggtacatgaatcactgcatccaggagaaggatatctgcgatcatttcgctaccctgggcgctagcgacaacggggaggagcaaaccgtgaacctgtttctgcagatccagaatgcctacaccgacgctcagagcctgatcgaaaatgactatcccgaggatcggaacctggcccaggacaaagagaacgtcgccagactgaaggccctgctggatgctgtgaaggccctgcagcggtttgtgaaacctctgaggggcaacggagacgagcctgacaaggacgagcgattctatggcgagctggccgtgctgtgggaggagctcgaccacatcacacctctgtacaacaaggtgcggaaccgcatgacaagaaagccctacagcatcgaaaagtttaaactgaacttccagaattccacactgctggacggctgggatctgaataaagagcgcgataacaccggagtgattatgagaaaggacggcaagtacttcctggccatcatgaacaaacagttcaatagaattttcgttgacgccccccaggccggacacgacgaggataccttcgagaagatggagtataagctgctgcccggagctaacaaaatgctgcccaaagtgttcttcagcaagtcccggatcgaagaattcaagcctagcccagagctgctggagcactatgagaagggcacccacaaaaaaggagataactttagtctgaaagactgtcatgagctgattgatttctttaaggccagcatcgccaagcatgaggactggtctaagttcgacttccatttttccccaactgatacatatgaggatctgtccggcttctacagggaggtggaacagatgggctataagatcagctacaagcagattcccgtgtcatacatcgacaagatggtggaggaaggaaagctgtttctgttccagatttacaacaaggatttcagcccatatagcaagggaacccccaatctgcacacgctctactggaagatggtgtttgacgaacggaacctggccaatgtggtctacaaactgaacggccaggccgaggtgttctataggaagaaatctctggactatgacagacctacccatcccgctaaccaggcaattaagaacaagaaccccgagacaacaaagaaagagtccacctttgattacgacatcatcaaagacaagagattcaccatggataaattccagttccacgtccccattaccatcaacttcaaggccaccgggtctggctctatcaatcctctggttaatcagtacatccacgaccacgacgacctgcatttcatcggcatcgatcggggcgagagacacctgctctacgtgaccgtgattgacagcaagggatgcatcaaggagcagttcagcctgaacgagatcgtgaacgagtaccagggcaacacctataagaccaactaccgcagcctgctggataaacgggacgacgagcgccagcgggagcggcagagctggaataccatcgagggtattaaggaactgaagcagggatacctgtctcaggtgattcacaagatcgtgagcctgatggtgaaataccacgctgtggtcgtgctggaagacctgaacatgggcttcaaacgcggccgccagaaagtcgagtcctccgtgtaccagcagtttgagaaggccctgattgataagctcaacctgctgatcgacaagaaaatcgacgccgatcagcccggtggcctgctgcacgcctaccagctgaccaacaagttcacctcctttagagacatgggcagacagaacggcttcctgttctatattcccgcatggaacaccagcaaaatcgatccagtgaccggcttcgtggacctgctgcatcctagatacgagagcgtggacaaatcccgctccttcttctgcaagtttaagagcatcaggtacaaccaggacaagggatggtatgagttcaccatggactataatgacttcacaactaaggctgaaggaacaaggacagagtggactctctgcacacacggcacccgggtggagacattcaggaacgccgagaaaaattcctcctgggattccagagaggttaatctcactgacgagttcaatgccctgtttgcgacctacggcgtcgagccccagggcaatctgaagcaggctatcgccgagagatcccagaaggaattcttcgataaactgacccacctgctggccctgacactgcagatgcggaataacatcaccggcaccgaagtggactacatgatctcccctgtggctgacgagaatgggaaattcttcgatagtcggacctgcgggaaggaactgccagaaaacgctgacgccaacggggcctataacatcgcccgaaaaggactgtgggtcgcccggcagattcaggccgcccacgtggatgagaaggtgaacatggccatctccaacaaggaatggctgtccttcgctcagtccaagccctatctgaatgactga

SEQ ID NO: 173 - DNA, 3720 bp, unidentified
  source 1..3720: mol_type = other DNA
atgaaacagttaaatgatcttactggtctgtactcactcagtaagacccttcggttcgaactgaaacctattggaaagaccctcgagcatattgaatcgaaaggattcattacacaggacgagaagagggccgaagaatacaagagagtaaaagatatcatcgatcggtaccacaaaagcttcattacaatgtgtctctgtggttttaaattcaatcaggaagacctcgacacatacgccgctctggcggaagacttcaatagagatgaaaaagcctttgaggagtctaaaaagactttacggaagcagatcgtgggagcctttaagaaaggcggcggctatagcgaccttttcaagaaagaactgatccagaagcacctgccagagatcgtgacagatgacgaggaaaagaaaatggtcgaaaacttctccaagttcacaacatatttcaccggtttcaacgagaatagaaagaatatgtactccgacgaggaaaagagcaccgcgattgcttacaggctgatacatgacaacctgcctatgtttcttgacaatacgcgtagtttctcccggatcgctgatagcgacgttaggcagtctttctgcaaaatagagtcatcttttagcgaatacctgaatgtggagcatctcgcagagatgtttcagctggattacttcagtgagacattgacgcaggaacagatcgcagtgtataaccacgtggttggtggccgcacattggaggacggaaccaaaattcagggaattaacgagtatgtcaacctatataaccagcagcataaggataatcgattaccactcctcaaaccgttgtataaaatgattctctcagatcgagtggcactgtcttggctgcccgacgaatttgcaaatgacaaggagatgatcgacgccatcaaagagacatacgattcactgaaggaaaatctcactggtgacggcgatggtagtcttagaaatctgctgctcaacatcaacaattacgatatcgagcacatctatattgcgaacgaccttggactaaccgacatcagtcagcagatgtttgggcaatatgacgtgtacacatccgctatcaaacaggaacttagaaattccgtcactcctacggctaaggaaagacgcgaaccagaactctatgctgagagaattaacaagctctttaagtccactaaatcattctctgtagcttacctgaactctttggtggatgccgagcacaccatccagaactactatcaacagcttggagcctatgatcgcgacggcgaacagcgcatcaatctctttactcaactggaaatggcttacgttgcagctaaagatattctgtccgggaagcatggtaacatctctcaaaccgatgccgagattgccattattaagaacttgctggatgcctacaagtccctgcagcattttataaaacccctgctggggaatggggatgaggcggacaaagacaacgagttcgacgcaaaactgagagaggtgtgggacgctttggacatagtcacccccctatataataaggttcgaaattggcttactcggaagccatattccacggagaaaattaagctcaattttgagaatgcccagctgctgaatgggtgggacaagaacaaagagacggactgcacaagcgtgctgctcaggaaggacgggaaatacttcttagcaatcatggataagaaggctaaccgtgcattcgatgtcgaagaccttccctgcgatggcatttgcttcgagaaaatgaactacaaacaaatcgcgctccccatgggcttaggggcgtttgtcaggaagtgcaccggctcggcaaaaaaactgggttggacctgtccctccagtctgctgaacaaggacatgaagatcatcatcaaagatgatgaggctactaatgtcctcccttctttaattgagtgctacaaggacttcttaaatatctatgagaaggacggcttcaagtataaggacttcaactttaagttcaagccaacccacgagtataagaagctgtcacacttttttgcagaggttcctactcagggctataaaattacttttcggaaagtaagcgagtcattcatcaaccaactggttgatgaagggaagctgtatctgttccagatatggaacaaagacttctcggaattcagtaaagggtcacctaatatgcacacactctactggaaaatgctatttgacgagcgcaatctggctgacgtggtatataagctgaacggccaggccgaagtcttttaccggaagtcaagtttagacgtggctaacaccaccattcacaaggcccatcagcccatccttaacaaaaaccaggaaaacaaaaagcaacagtccactttcgactacgacataattaagaatcggcgttacaccgtggataaatttcagttccatgtgccaatatccatcaacttcaaagcaactggcagggataatgttaactctcaggtcctggatatcatccggaatggcggaattaagcacattattggtattgatcgaggggagcggcacctattatacctaagtttgatagacttgaaggggaacatcgtgaagcagatgacactgaatgatatagtgaatgagtacaacggaaacacctacgcaacaaattacagagacttgctggcagagcgcgagggcaatagaactgaggcccgcaagaactggaagaaaatcgaaaacatcaaggacatcaaacaaggctatctttctcaagttgtgcacataattagcaagatgatggtcgaatacgacgccatcgtggtcctggaagatctcaacatgggcttcatgcggggaaggcaaaagattgaaagatccgtctatgagcaattcgagaagatgctgattgacaagctcaattattacgtagataagcaaaaggacgttaacgaagccggcggcttgctccatgcccttcagctaacctcccgcttcgagagctttaaaaaactcggaaagcagagtgggtgtttgttttacatcccagcctggaataccagcaagatagaccccgtaaccggatttgtgaacctgtttgatacgaggtacaccaatgccgatcaggccagaaagttctttagcctgtttgatagcataaggtataacgccgagaaaaactggtttgagttcgcctttgactacgataaattcacaacaaaggccaaagggactcgcacacggtggactctgtgcacatatggaactcgtataaggacgttcaggaacccagccaagcttaatcagtgggacaataaagaagtggtgttaaccgatgagtttaagaaggcgtttgccgatgccggtattgatatccacgggaacttgaaggaagctatatgttcactggaggataaaaaataccttgaaccgttgatgcatctgatgaaactgctcctgcagatgcgcaactctatcaccaacaccgaggtggactatctcctgagccctgtcgctgataaaaacggcagcttctatgattctagggtgtgtagctatgccttgcctaaggatgcagacgcaaacggggcttacaatatcgctcgtaagggactatgggctattcgccaaatccaggaaacccctgtgggagagcgaccgaatctggcaatcaagaataatgagtggttgaaatttgcccaacagaagccctaccgagacgaatga

SEQ ID NO: 174 - DNA, 3765 bp, unidentified
  source 1..3765: mol_type = other DNA
ctgctgaactacaaatactacatcgtgatgaagacatacgatgagctgacgggcctgtattccctgagcaaaacgctgagatttgagctgaagcctgtgggtaagaccctggagtacatcgagaacaagggcatcatcgctcaggacgagaagcgcgccgaggaatacaagctggtgaaaggcattatcgacagataccacaaatccttcatcagactgtgtctgtacaactttaagctgaagctggaatctgacaacggactggatagcctggaagagtacgtggaatacgcctcaatccaacggaggaccgacacccaggacgctgagttcaagaaggtgaaagagaacctgaggaagcagatcgtgagcgcatttaaaaacggggccacctatggcgatctgtttaagaaggagctgatccagcagatcctgcctgatttcgccgacaatgatgaggagagacagctggtggacaactttagcaagttcacaacctacttcaccgggtttcatgagaacaggaaaaatatgtactccgaggacgataaagctaccgccatcgcattccggctgatccacgagaatctgcccctgttcattgacaacatgaagagttttgccaagatcgccgagaccgtggtggccgagcacttcgccgatatcgagacggcttttgaggattgtctgaacgccctgatccccgatatgttcgctctgccatacttcaccaaaacactgacccaggagcagattgaagtgtacaataatatcatcggaggcagggtgctggaggacggcaccaaaatccagggcatcaatgagtacgttaacctctacaaccagcaacagaaggacaagtctgcgcgcctgcccctgctgaaaccactgtataagatgatcctgagcgatcacgtggccatttcctggctgcccgaggagttcgccagcgatgaggagatgctgtctgccatcaacggggcctacgacatgctgaaggacgtgctgtctgaaaagaacgaggactctctgttcaacctgctgaagaacatcaacgagtacgacaccgagcacatctttatcgctaacgacctgggcctgaccgacatttcccagcagatcttcggccagtacgacgtgtatagcagtgtgattaaagctgagctgaggaatcaggccagtatgaccgccaaggagaagaagaatcccgagctctatgaggacagaatcgccaaactgtacaaatcagccaaatcatttagcatcgattacctgaatagttttgtagacagcgaaaagtcaattcagaattattatgcccagctgggggcatacgaccgggatggcgagcagaggatcaacctgtttgcccagatcgaaatgaagcacatcgccgtggccgacatcctggccggaaaggtggccaatctgaaccagagcgaacagggcatcaaactgattaaggacttcctcgacgcatttaaagccctgcagcatttcatcaagcctctgctgggaaacggcgacgaaactgataaggacaacgccttcgacgccagactgagggtggcatgggacactctggacatcattactcccctgtacaacaaggtgcgcaactggctgacaagaaagccctactccgaggagaagatcaagctgaacttcgaaaacgcccagctgatgaatggctgggacctgaacaaggagcccgattgcacctctatcatactgagaaaggacgacaagttttacctggcaattatggacaaaaaggccaaccattccttcgataccgacgagctgcccaacgagggagattgttatgagaaggtggactacaagctgctgcctggcgccaataagatgttgcccaaggtgttttttagcaagagccgcatcgacgaatttgccccaagccagtccctgctggatgcttatgagaagggcagccacaagaagggcaccaatttctccctgaacgactgccataatctgatcgacttcttcaaacagtcaatcgccaaacatgaggactggaagaagttcccctttgattttagtgacacaagcagctacgaagacattagcggcttctatcgcgaggtggaacagcaggggtacatgctgtcttacagaaatgtgtctgccgcctacattgataagctggtcgacgagggcaagttgttcctgttccagatctggaacaaagatttttccgaatattccaaaggcactcctaacatgcacaccctgtactggaagatgctgttcgatgagaagaatctggccaacgtggtgtacaaactgaacggacaggcagaggtgttctaccgcaagaagtccctggacattgcaaataccacagtgcataccgctaaccggcctattgccaacaagaacaaggataacaagaaaaaagagagcacattcgagtacgacatcattaaaaaccggcggtacaccgtggacaagttccagttccacgtgcccataaccatgaacttcaagagcattgggaacgacaatatcaatgagagcgtgctgaatgtgattcggaataacgggattaagcacatcatcggaatcgacagaggcgagaggcatctgctgtacctgtcattgatcgatctgaaaggcaatatcgtgaagcagatgaccctgaacgacatcgtgaacgaatataatggcaacacctacagcaccaactataaggacctgctggccaccagggagggagataggaccgacgccagacgcaactggcagaaaattgagaacatcaaggacctgaaggagggatacctgtctcaggtggtgcacgtgatagcaaagatgatggtggagtacaaagccatcgtggtgctggaagatctgaacatgggctttatgcagggcaggcagaaaatcgagagaaacgtgtacgagcagtttgagcggaaactgatcgagaagcttaacttttacgtggacaaacagaagaaggccgacgaggtgggcggactgctgaatgcttaccagctgacctctaagttcgatagtttcaaaaaactcggcaagcagtctggctgcctgttctacatcccagcttggaacaccagcaagatcgaccctgtgaccggcttcgtgaacatgctggacacaagatacgagaataccgaaaaagccaggtgttttttctctaagtttgacagcatcaggtacaacacccagaaggactggttcgagttcgcctttgactatgggaacttcaccaccaaagccgatggcacccagaccaaatggaccctgtgctccttcggcactagggtgaagaccttcagaaaccccgagaaggtgaatcagtgggacaatgtggaggtggtcctgactgaggagtttaagagcctcttcgctgacgccggcatcaacatcaacggcaatctgaaggagcagatatgcaatctgtccgacaagaagtatctcgagccactgatgggcctgatgaagctgctgctgcagctgaggaatagtatcaccaatagcgaggtggactacctgctgagcccagtatgcgacaataaagggaacttctacgactcaagaacctgcagtaataagctgcctaaggacgccgatgcaaacggggcctacaacattgcaagaaaaggcctgtgggccctggctcgcatcgtggatagcgctgaaggggagcggcctaacctggccatctccaataaggactggctgtgtttcgcacagcagaaaccttatctgaacgattga

SEQ ID NO: 175 - DNA, 3729 bp, synthetic construct
  source 1..3729: mol_type = other DNA
atggagagatttgacgaactgaccggcctgtacagcctgtccaaaaccctccagttcgagctgaagcctatcgggaagactctggagcagatcgagagaaagggcatcatcgcccaggatgagaaaagggctgaagagtacgagatcgccaagtgtattattgacgagtaccacaaggcctttatcagcatgtgtctgaagggactgaggctgaatctgtccagcacaggctctctggacagcctggaggagtacgtggagcaagccagcaagctgagaagaagtgaatccgaggagaaaaatttcgacaccatcaagcagaacctgagacggcagatcgtgaactcctttaagagccgcggcggctctttcactgacctgttcaagaaggagctgattacccagcacctgcccgagtttgtgagtgagaagaacaaaaagcagattgtggagaacttttccaagttcactacttacttcactggcttccacgagaaccggaagaatctgtactccgaggaagagaaatccacagccatcgcttaccgactgattcacgaaaatctgcccatgtttatcgacaacatcaagaccttcgccaaaatcgccgactccgatgtggccaattactttgtggagatcgagaccaccttttccgagtacctggacggctcccatatcactgatatgtttaaactggagtactttaccgaaaccctgacccaggagcagatcagtctgtacaacaacgtgatcgggggcgtgagcaatgaggatggaaccaagaagaaggggctgaacgagtacgtcaatctgtacaatcagcagaataagacccggctgcctctcctgaagccactctacaagatgctgctgtccgacaaggtgtccctgagctggctgcctgatgacttcgtgtctgacgaagagatgatttatgctattaacgaaatgcagctcagcctgaaggacctgctgtactctgacggtgaaaacagcctgaagtatctgctgactcacatcggcgattacgacaccgagcatatttacatctccaacgacctgggcctgaccgacatcagccagcagatcttcggccagtatgatgtgtataccagcggcatcaaaaccgagctctgcaatcaaatcaagcagagcgccaaggaaaagcgcgagcccgaactgtacaaagaaaggatcaacaagctgttcaaaagcgccaaatcctttagcataaactacctcaattccttcgccgagggcgataagaccattcaggcctactatgccagactgggagcacatgatctggagggagagcagagtaccaacctgttcacccagattgaaatggccagcatcgccgcctctgacatcctggccgggaagcacaccaatattaaccaaagcgaggaggataccaagctgatcaaggacctgctggatacctacaaagctctgcagcacttcatcaagcccctgctgggaaacggcgacgaggccgacaaagataacgaattcgacgcccgcctgagaaacgcctgggacgcactgagcgtggtgacaccactgtacaataaggttagaaactggctgactagaaagccctacagcaccgagaagatcaaactgaatttcgacaatgctcagctgctgggggggtgggacctgaataaggagcccgattgcacttcagtgctgctgcggaaggatgacatgttctacctggccatcatggacaagaagtacaaccacgccttcgatatcgatgagctgccatgcgagggcgagtgctacgagaaggtggattataagctcctccccggcgccaataagatgctgcccaaggtgtttttcagcaagtcaagaatttctgaatttgccccatctctggccatccagaagagctacaacgagggcacccacaaaaaggggtccaacttttctatcagcgactgtcaccgcctgattgattttttcaagcagagcattgccaagcacgaagactggtctaaattccctttctctttctccgacactaagagatatgaggacatctcaggattctatagagaggtggagcagcaggggtacatgctgagctatcgcaacgtgtccgtgagctttatcaatcagctggtggacgaggggaagctgtacctgttccagatctggaataaggactttagcaagtactctaaagggacccccaatatgcacacactgtactggaaaatgctgttcgatgaagtgaacctggctgacaccgtttacaagctgaacggtcaggctgaggtgttctacaggaagtctagcctgaaactggaaaacacaaccatccacaaggccaaccagaccattaagaacaaaaatgtgcagaatgagaagaagacaagcactttcgactacgacatcgtgaagaatcgcagatacacagtggataaattccagtttcacgtgccaatcaccctgaacttcaaggccaccggcggcgacaacatcaacgcaaacgtgcaggacataatccggaataatggcatcgagcatatcatcggcatcgacagaggcgagagacacctgctgtacctgagcctgattgatctgaagggtaacattgtgaagcagatgaccctaaacgacatcattaacgaatataagggcaatatctataagacaaactacaaggatctcctggtgacacgcgagggggaccgcacagaggctaggaggaattggcataagatcgagaatatcaaggacctgaaggagggctacctgagtcaggtggtgcacatcatagccagaatgatggccgagtacaaagccatcgtggtcctggaggacctgaatatgggatttatgcgggggcgccagaagatcgagcggaacgtgtacgaacagttcgaacggatgctgatcgataaactgaactactacgtggataagcagaaaaaggccacagagaatggcggactgctgcatgccctgcagctggccaacaagttcgagagctttaagaagctgggcaaacagtctggctgtctgttctacatacctgcttggaatacctccaaaattgatcccgtcactgggtttgtgaatctgtttgaaattcactatgagaatgtggacaaggccaggtgctttttctcaaagttcgatatcatccagtacaacgaggagcgcgactggttcgagtttgccttcgattacaatgactttgggaccaaagctgagggcaccaagtctaaatggaccctgtgcacatatggcaccagaattaaaacctttcgaaaccctaacaaactgaaccagtgggacaatgaggaggtggtgctgaccgaagagtttaagaagatcttcaacgaggctgggatcgacatcaacgggaatattaaggacgcaatctgccagctgaaggagaagaaacaccttgagagcctgatgcacctgatgaaactcctgctccagatgaggaacagcgtgagcaacagcgagatcgactacctgctgagccccgtggccgatgagaatggggagttttacgacagcagaacatgcgccccaactctgccaaaggatgcagacgccaacggagcgtacaatatcgctaggaagggcctgtgggtgatcgagcagatcaaacagactgccgacaagcccaggctggccatgactaacaaggagtggctgaagttcgcccaggataagccctatctgaacgaatag

SEQ ID NO: 176 - DNA, 3738 bp, unidentified
  source 1..3738: mol_type = other DNA
atgaatacctttaacgagctgtccggcctgtacagcctgcggaagaccctgcagttcgagctgaagcccatcggaaagaccctggaaaacatcgagaaaaagggcatcatcgagcaggacacacagagagatgtggaatataagaaggtgaagggcatcatcgacaactaccacaaggcctttatcaaaatgtgcctgtggaacctggagctgaagctggagagcgatggccactccgactccctggaggactacgtgagactggccagtatcatcagaagaggcgagctggacgagatcgagttttctaaagtcaaggacaacctgcggaagcagatcgtgtcggcttttaagaatgggaactcctatggcgatctgtttaaggaggaactgatccaggaacacctccccaactttgtgactgatgaggctgagaagcagatggtggataatttcagcaagttcaccacttacttctccgagttccataagaacagaaaaaatatgtatagcgacgagaagaagtcaaccgccatcgcatacagactgatccacgagaacctgccaatcttcatcgataacatcaagaccttcaaaaagattgccaacactgaaatcgtgaaccactttgccgacatcaagcaggcttttcaagaatgtctgaacgttgagaacatcgacgaaatgttccagctgaactacttcaccaagacactgccacaggagcatatcgagacctacaataacattattggcgggaaaaccaacgaggacgggagcaaaatccagggcctgaatgagtatatcaacctgtataaccagcagcagaaggatcacagcaacaggctgcccctgttcaagcccctttataagatgatcctgagcgacagagaagccctgagctggctgcccgaagagtttgccagcgacgaggagatgattaatgccatcaacgaggtgtatgatagccttaaaaacgtgctggccaacgacaataacggcctgaagcacctgttgctgaacatcaaccagtatgatacggagcagatctatatcgctaacgacctgggactgaccgatatttcccagcagatgttcggcaaatatgacgtgttcaccagcggcatcaagaacgagctgagaggccagatttctccctctgccaaggagaaacgcgagcctgagctctacgaggagaagatcaacaagatcttcaaatccgccagatctttcactatcaactacctgaacagctttgtgcaggacggaaagacaatccagagctacttcgcacagctcggcgccaccaacacagattctgcccagtgcattgacatcttcaccaagattgagatggcccacatcgccgccaccgatatcctggagggcaagcacaactccatcgaccagtctgatagcgatattaaactgattaaggacctgctggatgcttacaaggagctgcagcacttcataaagccactgctggggtccggcgacgaggccatgaaggacaatgagttcgacgctcagctgcactatgcctgggactctctgaatattattacccccctgtacaataaggtgaggaattggctgacaagaaaaccttattccacagagaagattaaactgaatttcgagaatgcacagctgctgggaggctgggacatgaacaaagagaccgattgtacctctgtgctgctccggaaggacaacatgtactaccttgccattatggataagaaaagcaatcacgcatttgatattgatgtgctgccaaatgagggcgactgctacgagaaggtggactacaagctgctgcccgacgcctacaagatgctgccaaaagtgttcttctccaagagtcgtatcaacgagttcgcaccctcaaaggatattcagaacgcctaccagaagggcacccacaaaaagggccctaacttcagcatctctgactgccaccggctgatcgattttttcaaacagagtatcgccaagcacgaggattggcagaagttcccattctctttctcagacaccgactcatacgacgacatctctggcttttatcgcgaagtgaaacagcagggctacatgctgggctataggaaggtgtccgtgtctttcattaaccagctgatcgacgacggcaagctctatctgtttcagatctggaacaaggatttttccgagcattccaaagggatgccaaatatccacaccctgtactggaaaatgctgttcgatgagagaaacctgagcaacatcatctaccggctgaacggcaaggccgaggtgttttacagacagaactcactgaagctggagaataccactattcacaaagccaaccagcctatcaagaacaagaacatccagaattctaaggagtgcagcacctttgactacgatatcattaagaaccgacggtacactgcagataaattccagttccacgtgcccatcacactgaacttcaggtctaccggctctgacaatatcaacaacaaagtgaacgatgtgatcagaaataatgatattgaacacatcattggcatcgacaggggagagaggcacctgctgtatctgagcctgattgatctgaagggcaacatcgtgaagcagatgaccctgaatgatattgtgaatgagtacaacggcaacacgtacaagaccaattataaagacctgctcgtgcagcgcgaaggcgaccgcaccgaggcaaggagaaattggcagaagatcgagaacatcaaggagatcaaagaagggtacctgtcccaggtgatccacatcatcaccaagatgatggtggaatacaaagccattgtggtgctggaagacctgaatatgggcttcatgagaggaaggcagaagattgagcgcaacgtgtatgagcagttcgagaagaagctgatcgataagctgaactattatgtggacaaacagaaagacatcaccgatgccggcggcctgatgcacgccctgcagctcgctaacaagttcgagagctttaagaagctgggtaagcagagtggctgtctgttttatatccctgcctggaatacctctaagatcgatccagtgacagggtttgtgaacctgctggacactcactacgagaatattgacaaggcacggtgcttttttagcaagtttgacagcatcagatacaacgccagcaacgactggttcgaattcgagctcgactacgataaattcaccgacaaggcacgcggaaccaagacccactggaccctgtgcagctatggcacccgcattcggacctttcgcaaccctctgaagctgaaccaatgggacaacgaagaagtggtgctgacagaggagtttaaaaaggtcttcaacaacgccaatattgacatctatggaaacctgaagaacagcatctgctcgctgaatgacaaaaccaccctggagtctctgatgcagctgatgaagctgatggtgcagatgcggaatagcattacaggcactgagaccgattatctgctgagccctgtgacagacgccaacggcaacttctacgattcacgcaacaatatacctacccttcccattgacgccgacgccaatggcgcctataatatcgcccgcaagggcctgtggatcatccagaagattcagcagtctcagcccggggagaaactgaacctagctatctcaaaccgggagtggctgcagttcgcccagcagagaccctacctgaatgagtga

SEQ ID NO: 177 - DNA, 3732 bp, unidentified
  source 1..3732: mol_type = other DNA
atgaagacattcaatgatctgaccggcctgtatagcctgagcaagaccctgaggttcgaactgaagccggtgggcaagaccaaggataatatcgagacaaagggcatcattgctcaggatgagaaacgcgccgaggaatacaagaaggtgaaggatatcatcgaccgctatcataaaaaattcatcgagatgtgtctggccaacctgaagctgaagacaatttccgacggcaataacgactctttgaaagagtatgtgacactggcctcaaaggcaaataaggacgagaaggaggacaacgacttcaaagatgtgaaaacagccctgcgcaagcagatcgtggacgccttcaagaagggcggcagctatagtgacctgttcaagaaagagctgattcaggtgcacctgcccgattttgtgacagacgagcaggagaagcagatggtggagaacttcggcaagttcactacctactttaccgggtttaatgagaataggcagaatatgtacagtgacgaggaaaagagcacctccatcgcatacagactgatccatgagaatctccccatgttcattgataacatcaagtccttcgccaagatcgccgaacacgaggacatcgacttcctgcccgatatcgagaacggcttcaaggaggaactgaagaggctgaaggcccagagcatctccgaggtgttcgacctggccaactttaccaacactttgacccaatcccagatcgatagctataacgccattatcggcgcacgccacgacgaaaacggggataaagtgcagggcatcaaccagtacgtgaatctctacaaccaaaagaacaaggacgccaggctgcccctgctgaaacccctgtacaagatgatcctgtcagatcgcggagccctgtcctggctgcctgaggagtttgccaccgacgaggaaatgctggcagctatcaacgagacccacggaaacctgaagaacgtgatgaccgacgtgcggaagctgctgcagaacatcgatagctacgacacagagcacatttatatcgccaacgacaaggggctgactgacatctcccagcagatcttcggccagtacgacgtgtatacctctgccattaaggctgagctgcgggatagcatcacccccagcgctaaggagcgcaaggacccagaactgctggagaagaggatcaatgacatcttcaaggcctccaagtccttcagcatcgaatatctgaatagccacgtggacagcgacaaaaccattcaatcctactacaaggagctgggcgcctacgacaggaatggcgagcagcggattaatctgttttcccagatcgagctggcctacgtggacgcccacgatgtgctgctgggaaaacataccaatctgaaccagagcgaggatagtatcaagaagattaaagccctgctggacgcctacaaagcactgctgcacttcatcaagcccctgctggggaacggcgatgaggccgacaaggacaacgagtttgatgctaagctgcgcgccatttgggacgagctggacatcgtgacccctctgtacgataaagtgaggaacaggctgacaagaaagccctacagtacagagaagatcaaactcaacttcgataatgcccagctgctgaacgggtgggacatgaataaagagccagactgcacctccgtgctgctgcgcaaggacggccagtactatctcgcaatcatggacaagaagagcaaccacgccttcgatatcgatgagctgccttgtaacggagaatgctacgacaagatggactacaagctgctgcctggagcaaacaaaatgctgcccaaggtgttttttagcaagtccaggatcaaggagtttgctccctccaaggagatttgcgacgcctaccagaagggaactcataagaaaggggccaattttagcatcaaggattgcagaaggctgattgacttcttcaaggatagcattgccaagcacgaggactggtcaaagttcccttttaccttctccgacaccagtacttatgaggacatcagcggcttctacagggaggtggagcagcagggctacatgctggggtatcgcaaggtgtcagtcagcttcatcaatcagctggtggatgagggaaagctgtacctgttccagatttggaacaaggactttagcgagtattcaatggggacccccaacatgcacaccctgtactggaagatgctcttcgatgagcggaatctggccaacgtggtgtacaaactgaatggccaggccgaggtgttctaccggaagaaaagcctagacctgaacaagactaccatccatcgagccaaccagccaatcgctaataaaaacatgcagaacgagaagagagaaagtaccttctgctacgatatcgtgaaaaacaggagatacaccgtggacaagttccagttccacgtgccgatcacaattaactttaaagctacagggtcagacaacatcaacgcctccgtcctggatgtgatcagaaacaacgggatcgagcatatcatcgggatcgatcggggagagagacacctgctgtacctgtctctgatcgacatgaagggcaatattgtgaagcagatgaccctgaatgacattattaacgagtacaagggcaatacatataccaccaactacaaagaactgctgcaggcacgggagggcgacagaaaagaggcacggcagaattggcagaaaatcgagaacatcaaggaactgaaggagggctatctgagccaggtcgtgcacgtgattaccaagatgatggtggagtacaaggccatcgtggtcctggaggacctgaatggcggcttcatgagggggcgccagaagatcgagagacaggtgtacgagaagtttgagaaaatgctgatcgacaagctgaactactacgtggataagcagagagacgctaacgaaaacgggggcctgctgcacgcctaccagctggccagcaaattcgataccttcaagaaactcggaaagcagagcggttgcctgttttacatcccagcctggaacacctccaagatcgaccctgtgaccggatttgtcaacatgctggatacccgatatgagaacgccgacaaggcccgcaacttcttttccaagttcaagtccatcaattacaatgctgacaagaactggttcgagttcgtgatagacgactactcaaagtttacggacaaggccaaggataccagaaccgattgggtgctgtgcacatacggcaccaggatcaagactttccggaatcctgagaagctgaaccagtgggataacaaggaaattgtgctgaccgacgaattcaagaaagtgtttatggaggccgggatcgacatcaacggcaacctgaaagaggctatttgcactctgacagagaaaaagcatctggagtccctgatgcagctgatgaagctgctggtgcagatgaggaattctgagaccaactctgaggtggactacctcctgagccccgtcgccgacaccgagggacatttttatgacagcagaaactgcggggacaatctgcccaaggacgccgacgctaacggcgcctacaatatcgcaagaaagggcctgtgggccgtgatgaagattaaggccagcaagccccaggagaatctgaagcttggaatctctaacaaggagtggctgcagttcgctcaggaaaagccttacctgaacgactaa

SEQ ID NO: 178 - DNA, 3765 bp, unidentified
  source 1..3765: mol_type = other DNA
atgaagaacatcctggagcagtttgtgggcctgtaccccctgtctaagacactcagatttgaactgaagcccctgggcaaaactctggagcacatcgagaagaaaggcctgatcgcccaggacgagcagagggccgaagagtacaagctggtgaaggacatcattgacagataccataaggcctttatccacatgtgcctgaagcacttcaagctgaagatgtacagcgagcaggggtatgattccctggaggagtacagaaagctggctagcatctctaagcgaaacgagaaggaagaacagcagttcgacaaagtgaaagagaacctgagaaagcagatcgtggacgccttcaaaaacggaggaagctacgacgacctgttcaagaaggagctgattcagaagcatctgcctagattcatcgagggcgagggcgaggaggagaagcggatcgtggataacttcaacaagttcaccacctacttcaccggcttccacgagaacaggaagaatatgtactccgacgagaaggagagcaccgcaatcgcctaccggctgattcacgagaatctgcctctgttcctggacaacatgaagagctttgccaagattgccgaaagcgaagtggctgcccggtttaccgagatagaaacagcctaccggacctacctgaatgtggagcacatctctgagctctttaccctcgattacttttcaaccgtgttgacacaggagcagattgaggtgtacaacaatgtgatcggcgggcgggtggatgatgacaacgtgaagatacagggcctcaacgagtacgtgaacctgtacaaccagcagcagaaggaccggagcaaacggctgcccctgctgaagagcctctataagatgatcctgagcgataggattgctatttcctggctgccagaagaattcaagagtgatgaggagatgatcgaagccatcaacaatatgcatgatgatctgaaagatatcctggccggagataacgaagattcactgaagtctctgctgcagcacatcggacagtatgacctgtctaagatctacattgccaataacccaggcctgaccgatatctctcagcagatgttcggatgctacgacgtgttcaccaacggaatcaagcaggaactgagaaactccatcaccccaaccaagaaggagaaggccgataacgagatctacgaggagaggatcaataagatgttcaagagcgagaaatcattcagcatcgcctacttgaactccctgcctcacccaaagactgatgctccccagaagaacgtggaggactatttcgctctgctggggacctgtaatcagaacgacgagcagcagatcaatctctttgctcagattgagatggccagactggtggcctccgacattctggccggaaggcatgtgaatctgaatcagagcgagaatgatattaaactgattaaggatctgctggacgcctataaagccctgcagcacttcgtgaaaccactgctgggcagcggcgatgaggctgagaaagacaacgagtttgatgctcgactgagggccgcgtggaacgctctggatattgtgacccctctgtacaacaaggtgcgaaactggctgaccaggaagccttacagcaccgagaaaatcaaactgaatttcgagaatgcccagctgctgggcggctgggatcaaaataaggagccagactgcacatccgtgctgctgaggaaggacgggatgtactaccttgccatcatggacaagaaagccaaccacgccttcgactgtgactgtctgccctccgatggggcctgcttcgagaaaatcgactacaagctgctgcctggcgccaacaaaatgctgccaaaggtgttcttctccaagtctcgcattaaggagttctctccctctgagagcatcatcgccgcctacaagaagggaacccataagaagggcccaaatttctctctgagcgactgccaccggctgatcgactttttcaaggcatcaatcgataaacacgaggattggtctaaattccggtttcggttctccgacaccaaaacttacgaggacatctccggattttaccgcgaggtggagcagcagggctacatgctgggtttcaggaaagtgagcgagacttttgtgaataagctggtggacgagggcaagctgtatctctttcacatctggaataaagacttcagtaagcacagcaagggcacacccaacctgcataccatctactggaagatgctgttcgacgagaagaacctgactgacgtggtgtacaagctgaacggccaggccgaggtcttctatagaaagaaatctctggacctgaataaaactaccactcacaaggcccacgcccctatcacaaacaagaacacccagaacgccaagaaggggtccgtgttcgactatgacatcatcaagaatcgccggtatacagtggataagttccagttccacgtgccaatcactctgaattttaaggcaaccggccggaattacatcaatgagcacacccaggaagccatcaggaacaacgggatcgagcacatcatcggcatcgacagaggcgagcggcatctgctctacctgagtctgatcgatctgaagggaaacatcgtgaagcaaatgactctgaacgatattgtgaacgagtataacgggcggacctacgccaccaattacaaggatctgctggccacccgggagggagagagaacagatgcacgccgcaactggcagaaaatcgagaatattaaggagattaaggaagggtacctctctcaggtggtgcatatcctgtctaagatgatggtggattataaggcaatcgtggtgctggaggatctgaacaccggcttcatgaggagccggcagaaaattgagagacaggtgtatgaaaagtttgagaaaatgctgatcgacaagctcaattgctatgtggataagcagaaggatgccgacgagactgggggggccctgcaccccctgcagctgaccaacaagttcgagtccttccggaaactgggaaaacagagtggctggctgttctatattccagcatggaacaccagtaagatcgaccccgtgacaggattcgtcaatatgctggacacccgctacgaaaatgccgacaaggcaagatgcttcttctccaagttcgatagcatcaggtacaacgccgacaaggactggttcgaattcgcaatggactacagcaaattcactgataaggccaaggacactcatacatggtggactctctgtagctacggcacaagaatcaagaccttcagaaaccccgccaagaacaatctgtgggacaacgaggaagtggtgctgacagatgagttcaagaaggtgttcgccgccgccggcatcgacgtgcatgagaatctgaaggaggcaatttgcgccctgaccgacaaaaagtacctggaacccctgatgcgcctgatgacactgctggtccagatgaggaattccgccaccaacagcgaaaccgattacctgctgagtccagtggccgatgagtctggcatgttttatgattcccgggagggcaaggaaactctgccaaaggacgccgacgccaatggggcctataatatcgccaggaaaggcttgtggactatcagaaggatccaggccaccaatagcgaggagaaagtgaacctcgtgctgagcaacagagaatggctgcagttcgcccagcagaaaccatacctgaatgattga

SEQ ID NO: 179 - DNA, 2145 bp, unidentified
  source 1..2145: mol_type = other DNA
ctgaccaggaagccctacaagaccgagaaaatcaagctgaactttgagaattcccagctgctgggcggctgggacgtgaacaaggagccagattgcacctcagtgctgctgagaaaagatggcatgtactacctgggcatcatggataaaaaggcaaacaagagtttctactgcgattgcctgccatcagagggcagctcttacgagaaggtggactacaaactgctgccaggggccaacaaaatgctgcccaaggttttcttttccaagagccggaagtcggagttcgcccctagcgaagtgatcacaaaggcctacgagaacggaacacacaagaagggggctaactttagcctctcagattgtcacaggctgatcgactttttcaaggccagtattaataagcatgaggactggagcaggttcggctttatcttctctgaaacaaatacttacgaggatatggtgggcttttacagggaggtggagcagcagggctacatgctgggctttaggaacgtgtccgaggagtacattgatcggctggttgacgatgggaaactgtacctgtttcagatctggaacaaagactttagtgagcactccaagggcacccccaacctgcacacaatctactggaagatgctgttcgacgaacgcaacctggagaacatcgtgtataaactgaacggacaggctgagctgttttacaggaagaagagcctggatctgtgcaagaccaccgtgcacaaggcccaccagtctgtggccaataagaaccctcagaatgacaagcgggagtctatttttgaatacgacattattaagaacagacgctatactgtggacaagttccagtttcacgtgcccattactattaacttcaaggccacaggggatgacagactgaatagcgccaccctggaggccattagggacggaggcatcgaacacatcatcggcattgatagaggcgaacgccacctgctgtacctgagcctgatcgacctgaaaggcaatatcgtgaagcagttcaccctgaacgagatcgccagcgaatacaacggcgccccctgtcctccaaccaactataaggatctgctggtggcccgggaaggggacagaaacgaggcccggagaaattggcagaagatcgagaacatcaaagaaatcaaggaagggtacctgtcacaggtcgtgcatattatcgccaaaatgatggtggagtacaaggccatcgtggtgctggaggacctgaacatgggctttatgagaggtagacagaagatcgaacgccaggtgtacgaaaagttcgagaagatgctgatcgataagctgaattgctacgtggataagcagaaggaggccaccgatatcggcggagtgctgcacccactgcagctgacaagcagattcgaaagttttcggaagctgggaaagcagagcggatggctgttttacattcctgcctggaacactagcaagattgaccctgtgaccggcttcgtgaatatgctggacacacggtacgagaacgtggacaaaactagatgcttcttctctaagtttgacgtgattcgctataacggggacaaggacctgttcgagttcacatttgactacgataagtttacagacaaagccaagggaaccagaactaagtggacactgtgcacctacggcagcagaattaaaactttcagaaatccaaagaagaacaatcagtgggacaacgaggaaatcgtgctcacagacgagttcaagaaggccttcgccgacgccggcattgacatcgagggcaatctgaaagatgccatctgcagcctgacggagaagaagcacctggagcctctgatgaacctcatgaagctcctgctgcagatgcggaacagtaagaccggcaccgagatcgactatctgttgagccccgtggctgatgcagacggaaacttctacgacagccgcaacgagatctccaccctgcccaaggacgctgacgccaacggcgcatacaacatcgcccggaagggcctgtgggccatccggaagatccagagcgcaccatccggagagaaacccaatctggccattagcaacaaagagtggctgcagtttgcccagcagaagccctatctggatgactaa

SEQ ID NO: 180 - DNA, 3852 bp, unidentified
  source 1..3852: mol_type = other DNA
atgaacacatttaaccagttcaccaacctatataatgtgcagaagaccctttgttttgagctccagcccgtaggaaaaactagggagaacatcgaggaggacggattactcaaacaggacgaagagagagccgagaactacaagaaggtgaaaggcttcatagatgaataccataagcagtacattaaggaccgcctttggaattatgaactgcctctgaaaggtgagggcaaacgcaacagtctggaggagtaccaacagttttacgagctgtccaagcgggacgcaaatcaggaggcaactttcacagaaatcaaggataacctgcgcgctatcatagctaaaagacttaccgaaaagggctcggcatacgagcggattttcaaaaaggaactgatccgggaggacctcattgaatttctcgataaggaagaagacaaggagctggtgagacagttctccgatttcactacctatttcaccgggtttcatgaaaatcgcgcaaacatgtataaagatgaggaacagagtacgtctatcgcttaccgactcatccatcagaatctgccgaagttcatggataatattaaggcattttcggcaatagcccagacaccagttgcggaacacttcaaggaactgtatgctcgttgggagagttatttgaatgttagttccatcgacgagatgttcagactggattacttttctcataccctgactcagcctcatatagaggtgtacaattccataattggcaagagaatcttggaggatgggacagagatcaaggggattaacgaatatgtcaacctctacaaccagcaacaaaaggacaaaaagctccccttgtttgtgcccctgtacaaacagatactgtcagacagggaacgactgagctggctgagtgaggagttcgatagcgatgctaaaatgctcaaagccatcaatgagtgctatgatcacctgcacgatctcctgatgggcaaagagaacgaaagcctctgcgagcttctgaagcatttgacggatttcaacctctcacagattaatatcaccaacgacctgtctcttactgatattagccaaagcatgtttgggcggtatgatgtttttaccacggggttgaaaaatacccttaagatctccacaccacaaaagcgcgatgagaaggaggaagcttacgaggacagaattactaagctgtttaaagcgtgcaagagcttttcaatcgcagagctcaatggtttgcaactaccggtcgcagaggatggagggcacaaaagagtagaagactatttcataagcctgggcgctgtcggaaaagaaaaaaatctgttcgaacagatcgaggaggcctatactgaggctctccccattctgcagcttaaagaaacagacgatacactcagccagaacaaggctgctgtggccaaaattaaggatctcttggacgcctttaaaaatctacagcactttgtgaagcccttgcttggttccggcgaagaaaacgaaaaagacgaagtgttttatggggcctttcagacattatgggatgagttggatgcagtcacccccctctataataaagtaaggaactggctgactaggaaaccttacagcacggagaaaattaagctgaattttgacaacgcgcaactcctagatgggtgggacgaaaacaaagaaacagccaatgcttcaattatcctttgtaaggacgggttttattacctgggtatcgttaaaaaggacaatcggaaactattgggcatgcccatgccttccgacggcgaatgttatgataaggtcgtctacaagtttttcaaagacatcaccacaatggtgcctaaatgcacaactcaaaagaaggatgtcgtcgcacatttcgcacactccaacgaggattacattctgttcgacaaaaagaccttcaatgcaccagtgacgattaccaaggagatctacgagctcaacaatattctgtataacggcgttaagaagtttcagattgagtaccttcgttctactggggataagtctggatacgagcatgctgtcttcacttggaagaccttttgtctccaattcctgaaagcctataaatctaccagcatctataacctaaagttagtggagcaacacatcgactcctactacgatctgtctagtttctattctgccgttaatctgttgttgtacaacctgagttatcggaaggtttctatgtcatacgttcattcattggtcgaggaaggaaaactgtttttgttccgaatctggaacaaggatttttccgagtacagcaagggcacaccaaatcttcacaccctgtattggaaaatgttgttcgacgaaagaaatcttgccgacgtggtattcaaactgaatggtcaggctgaagtgttctacagaaaggccagcattaagcaggagaatagaattattcacccggcccaccaggctatcaacaataagaacccactcaacagaacccctaccagcacattcgactacgatatcatcaaaaataagcgctacacagtggacaagttcttattccacgtgccgattaccattaattttaaggccaagggactgacgaatattaatccacttgtccttgacgttatccggaagggtggcttctcacatattattggcatcgatcggggggaacgtcacctcttgtacctgtcactgatcgacttaaaaggcaacatcgttaagcagatgactttgaacgaaattatcaacgtgtaccgggagcaaacatatgtgacaaattatcacaacctactggcccaacgagagggagatcgcaccaaagcacgaaggagctgggacactatcgaaaacattaaagaactcaaagagggatacctgtctcaggtcgtgcatgtgatcagcaagatggtggttgagtaccacgcgatagtcgtgctggaagatcttaatatgggattcatgcaaagtaggcagaagatcgagaggcaggtgtacgaaaaattcgagaagatgctgatcgataaactcaactgctacatatacaaacaggtcgatcccacatcggagggaggtgtgttacacgctctgcagcttaccaacaagttcgagagctttcggaagctgggaaagcaaagtggttgcctcttctatatccctgcctggaatacaagcaaaatagaccccctaactggctttgtgaacttcataaaccccaagtatgaatctattcaggcggccagggatctcatcggcaagtttgaggacatccgatacaacccagaaaagaactatttcgagttccacatcaaagactacgctgcgttcaacccaaaggccaaatcttcaagacaggagtgggtgatctgtactaaggggactaggattaggacgtttaggaaccctgacaaaaacaacgagtgggacagtgaggaaatagtactgaccgagaagtttaaggagctgtttgactcctacggcattgactacaggtgtaatctgttagcgagcatactaatccagacaaagaaagactttttccataatgaggacgtgaagaagccttctctgctgtcactcctgaaattaacccttcagttacgcaactcccacataaattccgaggtagactatattctctcaccagtagccgacgccaaaggatccttttatgactcccgcacctgcggttctagtctgcccaataatgccgacgccaatggggcctttaacattgcacgtaagggcctgatgttagtggaacgcatccggtccataaaagatgatgaaaaacctgccttaactatcaccaatgaagaatggctgcattatgcccaggctcagtga

SEQ ID NO: 181 - DNA, 3840 bp, unidentified
  source 1..3840: mol_type = other DNA
atgaagtctctgaccaatctgtaccccgtgagcaagactctgaggttcgagcttcagcctattggaaagactaaggagaacatcgaaaagcacgggatcctgtctcgggacgagcagcgggctgaggattatattaccgtgaagaagtacattgacgagtaccacaagcagctgatcaaggatcggctctggaactttaagctgcccatgaagagcgacagcaagctgaactccctccaggaataccaggaactgtacgagctgtccaagagagacgcctgccaggaggacagatttaccgagctgaaggacaacctgcgggccatcatcgccaagcaactgactggggggaccgcttatggtcggattttcaagaaggagctgattcgagaggacctgatcgacttcctgacccaggaggaggagaaggagacagtgcgccagttcgccgatttcacaacttacttcactggcttccacgagaacaggaagaacatgtacagtgccgaggagaagtctaccgctatcgcctaccggctgatccaccagaacctgcctaagtttatggacaacatgaaggccttcgccaaaatcgccaagagtcctgtcgccgaaaagtttgccaacatttacaaggagtgggaagatagcctcaacgtgtcctgccttgaggaaatcttccagctggactatttctccgaaactctgacccagccccatatcgaggtgtacaattacatcattggcaagaagaccaaggaagacggcaatgacgtgaagggcatcaatgaatatgtgaatgagtacaacatgaggcacaaggacaaccctctgcctctgcttgtgcccctgtacaaacagatccttagcgatagagaaaagctgtcctggatcgccgaggagtttgattccgacgagaagatgctgtccgcgattaacgagagctacaactccctgcatgatgtgctgatgggcgaagagaacgagagcctgaggtctgtgctgctgcacattaaggactacaacctggagagggtgaatattaactcagagtccctgaccgacatcagccagcacatctttggcagatacgacgtcttcaccaatggtattaaagccaagctgcgcggaaagaaccccaagaaaaggaatgagtctgacgaaagctttgaagacagaatcacaaaaatctttaagacccaaaagagctacagcatcgcctacctgaacaacctgccccagcccaccatggaggatggaagggtgagaacaattgaggattatttcatcagcttgggcgccatcaacatcgaggcaaagcagaagatcaatctgttcgcccagattgagaacgcataccacgacgccttcaccattctgaagaggaccgacaccgacgacactctctcccaggataagaaggcagtggagaagatcaaagtgctgctggatgccttcaaggacctgcagcactttatcaagcccctgctgggctctggcgaggaaaatgagaaggatgagctgttctatggcatctttcagctgatctgggacgagctggaggctatcaccccactgtataacaaggtgaggaactggctgacccgcaagccatacagcacagagaagatcaagctgaacttcgataatgcccagctgctggacggatgggatgaaaacaaggaaacagctaacgcctcaattatcctgtgcaaagacggcctgtactacctggggatcctgaacaaagattaccggaagctgctggggatgcctatgccaagcgagggcgactgctacgataaggtggtgtacaagttcctgaaagacatcaccacgatggtgccaaaatgtactactcagaagaaggaagtggtggcccactttggccagagtgtggaggattacgtcctgttcgatcccaagaccttcaatgcccctgtgaccgtgactaaggagatctttgacctgaacaatgtgctgtacaatggggtgaagaagttccagatcgagtatctgcgcagcactgacgactcactgggctacgagcacgccgtgtccacctggaagagcttctgcatgcagtttcttaaagcctacaagtctactagtatctataacctggcctccgtggagcagaagatgaactcttactctgacctgtccagcttctacaaagccgtgaatctgctcctgtataacctcagctataggaaggtgagcgtggattacattcacagcctgaccgaggagggcaaactgtatctgttcagaatctggaataaagacttctccgagtttagcaaaggagctcccaacctgtttaccctgtattggaagatgatcttcgacgaacggaacctggacaacgtggtgtacaaactgaacggccaggccgaggtgtttttccgcaagagcagcattaagcccgagaacagagtgatccaccccgcccacagacccatcgacaataagaacgagcagaacaagaaacggaccagcaccttcaaatacgacatcattaaggattatagatatacagtggacaagttccagttccacgtgccaatcactattggctttaagagcgaaggacagacaaatatcaattcccgggtgcaggatattatccggagaggggggtttactcatatcatcggcatcgacaggggcgagcgccacttactttacctgtccctgatagacctccgcggcaacatcgtgatgcagaagactctgaatgtgatctctcgggaagtgcggggcgtgacctatagcacaaactaccgggacatgctggagaagagagaaggtgacaacaaagaagccaggcggtcttggggcgtgattgagagcatcaaggagctgaaggagggctacctgagccaggccatcagggagatcgccaacatgatggtggagtataatgccatcgtggtgctggaagacctgaaccagggcttcatgcgcggcagacagaaaatcgaacggcaggtctatgagaagttcgagaagatgctgattgacaagctgaactgttacgtggacaagcagatcgcccctagcagcatcggcggcgccctgcatcccctgcagctgaccaacaagtttgagagcttccggaagctgggaaaacagagtggctgcttgttttatattccggcctggaacacctccaagatcgaccctgtgaccggcttcgtgaatctcttcgacacacgctacgacaccagggagaaagctcgcatgttcttcagcaaattcaaaagaattaagttcaacacagagaaggattggttcgagttcgccttcaactacaacgacttcacctccaaggctgaggggactaggacagaatggaccctctgcacctacggggagagaatcaggcagttcagaaaccccgagaagaaccacaactgggacgacgagaccatcgtgctgacagacgagttcaaaagactgttctgtgagtacggcattgatattcatggcaacctgaaggagagcattgtggctcagtccgatgccaaattcttccgcggcctgctgggtctgatgaagttgctgctgcagatgaggaactccatcgccaattccgaggaggattacctgctctctcccgtgatggatgaaaaggggtgtttctttgactcacgcgataatgacggaaccctaccagagaacgccgacgccaatggcgcctacaacatcgcaagaaaaggcctgtggattatccggaagatccgggaaaccgccgagaatgagaagcccagcctgaaaatcaccaataagcagtggctgctgttcgcccagagcaagccttacctgaacgactga

SEQ ID NO: 182 - DNA, 3855 bp, unidentified
  source 1..3855: mol_type = other DNA
atgaacaccagcaacctgtccagattcaccaatctgtacagcatttccaagaccctgaggtttgagcttcaacctctgggcaagaccaaagactacattgagaagaatgggatcctcatgcgcgacgagaagagggccgaggactacaagaccgtgaagggcatcatcgacgagtaccacaagaagtatatcaagtcccgcctgtgggactttaagctgccactggcaagcgagggaaagcgggatagcctggaggagtacaaagccctgtacgaggttagcaagagatccgaagccgacgaggccgccttcaaagaggtgaaggataacctgaggagtatcattgccaagagactgactagcggcaaggcttacgagactatcttcaagaaggagctgatcagagaggaccttattaattctctggaggatgaggtggagagagaaattgtgtcccagttcgccgactttaccacctacttcggcggcttccatgagaatagaaagaacatgtacgatgccggagaaaaatctaccgccatcgcctaccgcctgatccatcagaacctccctaagtttatggataacatgaaggctttcgccaaaattgccgagacatccatcgccgaacacttcgcagacatctatgagggcagcaaggagatgctgaacgtcgggagcatcgaggaaatctttagactggattacttctcagagatcctgactcagcctcacatcgaggtgtacaatagcattatcggaaaaagggtgctggaggatggaactgagattaagggaattaacgagtatgtgaacctgtacaaccagcagcagaaggataagagactgccactgctcgtgcccctgtataagcagatcctgagcgacagagagaagctgtcctggctggccgaagagtttgactgtgatgaaaagatgctggcagccatcaacgaaacctacgcccatctgcacgacctgctgatggggaacgagaatgagagcctgagatcactgctgctgcacctccgggactacgacctggagcagatcaacatatcaaacgacctgtctctgacagacatatctcagcatctgtttggccggtacgatgtgttcacaaatggcatcaaggaggagctgagagtgatcacacccagaaagaggaaagagactgacgaacagctggaggacaggattagcaagatcttcaagacacagaaaagtttctgcattgccttcctcaactccctgccccagccagccatggaagatggcaaggcccgctgtattgaggactattttatggccctgggcgccgtgaacaacgaaaccactcagaaagagaacctgttcgcccagatcgaaaacgcctatgagaacgccaagtccgtgctgcagatgaaggaaaccggcgacatgctgagccagaacaaacccgccgtggccaagatcaaggccctgctggacgctctgaaggacctgcagcacttcattaaacccctgctgggctccggagaggagaacgagaaggatgagctgttttatggctcttttcagatgatgtgggatgagttggacgccgtgacctcactgtacaacaaagtgcgtaactggctgaccagaaagccatacagcacagagaagatcaaactgaatttcgataacgcccagctgctggacggatgggacgagaataaggaaaccaccaacgcctccatcctgctgtacaaggacggaaactactacctggggatcatcaagaaggaggatagaaagattctgggcagccctatgcctacagacggggagtgctatgataaggtggtctacaagttttttaaagacatcaccaccatggtccccaagtgtacaacccagaagaaggacgtgatcgctcacttcatgcactctgatgatgattacattctgtatgacaagaaaaccttcgatgccccagtgaccatcaccaaggagatctataacctgaacaacgtgctgtacaacggggtgaaaaagtttcagattgagtacctgcggtccactggagacaagaggggctacgaacacgccgtgttcatctggaagtctttctgcatgcacttcctgaaggcctacaagagcacaagtatctacaacctggtgctggtggagcagcagatcaactcctattacgatctgtctagcttttataatgctgtgaatcttctgctgtacaacctgtcctaccggaaagtgagcgtgaattacattcacagcctggtggacgagggcaagctgtacctgtttaggatctggaataaagacttcagcgagtacagcaaggggacccccaacctgcatacactgtactggaaaatgctgttcgacgagcggaacctggcagatgttgtgtataagctcaacggccaggccgaggtgttctatagaaagagttctatccagcctgagcatcggatcgtgcatccagccggcaaacccatcgcaaacaagaacgagcacagcaaagagccaaccagcactttcaagtatgacatcgtgaaggaccgcagatacaccgtggacaaattccagtttcatgtccctatcaccatcaactttaaggcagccgggcaggagaacatcaaccccgtggtgctggacgctattaggcggggaggcttcacccacattattggcattgaccggggagagaggcatctgctgtacctgagtcttatcgacctgcagggaaacatcgtggagcagatgaccctcaacgagatcatcaacgaatataaaggcctgaaacacaagactaactatcatgacctgctggccaagagggagggcgagagaacagaggcccgaaggtcatgggacaccatcgagaatatcaaagaaatgaaagagggctacctgagccaggtggtgcatatcatcagcaagatgatggtggagtacaacgctattgtggtgctcgaagatctgaacactggattcatgagaagcagacagaagattgagaggcaggtgtacgagaagttcgagaagatgctgatcgataagctgaactgttacatcgacaaacaggtgggcgctagcgatatcgccggcctgctgcacccactgcagctggcttgcgaagcaaaaaaatggaagagaagccaccagtgcgggtgcctgttctacatccctgcctggaacacctccaagattgatcccgtgacaggcttcgtgaacctgtttgacactaggtacgagaacgccgccaaggccaaagccttcttcggcaaattcggttccatcagatacaatgccgagaaggattggtttgagtttgccttcgactacaatgacttcaccaccaaggccgaggggacacggaccgagtggacactgtgcacttaccgggagcggattagaaccttccggaacccccagaaaaatcatcagtgggacgatgaagagatcgtgctgaccgacgccttcaagcagctgttcgataagtacgacatcgacatgaagggcaatctgaaggaggccatatgcgcccagaatgacgtgcagttcttcaaggacatgatggaactgatgaagctcctgctgcagatgaggaatagcataactaacagcgagaccgattacctgctgtctccagtggccgacgagaagggccagttttttgactcccgccggggcataaccacactgcccgataacgccgacgccaacggggcctataatattgcccggaagggcctgtgggtgatcaggaaaatccaggaaaccgctgagaatgagaagcccagtctggctataacaaacaaggagtggctgcagtttgcccagacaaagccctatctgaatgagtag

SEQ ID NO: 183 - DNA, 3741 bp, unidentified
  source 1..3741: mol_type = other DNA
atgaaacagtttacaaatctgtatccagtgagtaaaacactgcggttcgagctgcagcccatcggtaagaccaaggagaacatcgagaagaatggcatactgacccgcgacgaaaaacgcgccaaggactaccaggtcgtgaagggattcatcgacgagtatcacaaacagtatatcaaggaccggctgtggaatttcaagctgcctctggcttctgagggcaatctggactctcttgaagagtaccagatgctctacgagatgccacgcagggatgatacccacgaggaggatttcagtgaggtgaaggataacctgagggccatcatcaccaagcgactgaccgagaacggttcagcatacgacagaatctttaagaaggagctgatccgcgaagatttgatcgagttcctgaacaatgaggaagataaggccctggtgagacagttcgccgactttacaacatattttagcggctttcacgaaaacaggagaaatatgtactctgccgaggagaagagcaccgccatcgcctacagactgatccaccagaacttgccaaagttcatggacaacatgaaggccttcgccaagatcgccgagacatccgtggccgaacatttcagcaacatttatgagggctgggaggagtacctgaacgtcggcagtattgaagaaattttccggctggactacttctccgagactctgactcagcctcacatcgaggtctataattacatcatcggcaagaaagtgctcgaagacggaaccgagatcaaggggatcaacgagtacgtgaatctgtacaaccagcagcagaaggataagagcaagagactgccattcctggtccctctgtacaagcaaattttgtccgatagagagaagctgtcctggctggccgaggagttcgacagcgatgagaagatgctgggcgccatcaatgagagctacacccacctgcacgagctgctgatgggcgaagagaacgagtccctgcgcagcctgctgctgcacctgaaggaatacgacctgtcccagataaatatcactaacgatctgagcctgacaaatatctcccagcacctgtttggacgatatgacgtgtactccaatgccattaaggaacagctgaagatcatcatccctaggaagaaaaaagagaccgacgaagagtttgaggataggatcagcaagatcttcaagacacagaagtccttcagcatcagctttctgaataatctgccccaccccgagacagagaatggaaagcctcggagcgtggaggaatatttcattagcattggcactatcaacaccaaaaccacccagaaggagaatctgttcgctcagatcgagaacgcctacgaaaacgtgagagtgatcctccagatgaaagacactggcaatgccctgagccagaataaaccagccgtgaccaagatcaaggccctgctcgacgccttcaaagacctgcagcacttcatcaagcctttactgggcagcggcgaagagctggagaaggacgagctgttttatggcagctttcagatgatctgggatgagctgaacaccgtcacccctctgtacaacaaggtgaggaactggctgacaaggaagccctacagtacagaaaagatcaagctgaacttcgacaattcccagctgctgggcggctgggacgtgaataaggagcctgattgtactggcatcttgctgcgcaaggacagcttctattacctgggaatcatggataaaaaagcaaatcgggtgttcgaaaccgacatcaccccatcagagggcgactgctatgagaaaatggtgtacaaacagctgggccagatttctcagcagcttcctagaattgccttttccaagacctggcagcagaaactgtccattcctgaggacgtgatcaagatcaagaagaatgaatcctttaagaaaaatagcggcgatctccagaagctgatcagctactacaaatcttttatctcccagcacgacgaatggaatagctatttcgatatcaatttcaccgataggaatgattacaagaacctgcctgacttttatagcgaggtggatagccagttttactccctgagcttctcaagggtgcctagcagctatatcaatcagttggtcgacgagggaaagctgtacctgtttcgcatctggaataaggacttcagcgagtactccaagggcaccccaaacctgcataccttgtattggaagatgctgtttgacgagcggaacctgagtaacgtggtgtacaagctgaacggacaggccgaagtgttctatcggaaggccagcattcagcccgagaatagaatcatccacaaggccaacctgtctatcgtgaataaaaatgagctgaacaagaagaggacctccactttcgagtacgacatcattaaggatcgccgctacaccgtggacaagttccagtttcacgtgcctatcactatcaacttcaagggcacaggccagctgaacataaaccctattgtccaggaaaccatcagacagggagggttcacccacatcatcggaatcgacagaggcgaaaggcatctcctgtacctgtccctgattgacctgaatggcaatatcgtgaagcagatgacgctgaacgacatcttcaacgagtataaaggccagacctataaaacaaactatcacgatctgctggtgaaacgggagggcgatcgcaccgatgcccgccggtcttgggacaccattgagaccattaaggagctgaaagagggctatctgtctcaggtggtgcacgtgatctcaaagatgatggtggaatacaaggccatcgtggtgctcgaagatctgaataccggctttatgcgcggcagacagaaaattgagcggcaggtctacgaaaaattcgagaagatgctgatcgagaagctgaactgttacatcgacaaacaggccgacgccaccgaggtgacaggcctgctgcacccactgcagctgacatgcgaagccaaaaagtggaagcgctcccaccagtgcggctgcctgttctacattcctgcctggaacacttctaagatcgatcccgtcacagggttcgtgaaccttctggacacccggtacgacactagagagaaggccaggctgttcttctccaagttccagaggattagcttcaatacagagaagggctggttcgagtttacctttgactacaatgatttcaccactaaggctgagggcactagaacccagtggaccctgtgcacccacggggagagaatcagaacattccggaacccccagaagaataatcagtgggataatgagagaatcgtgctgaccgacgagttcaagaagctgttcgaccagaaagaaatcgatatttctggcaatatgaaggaggccatttgcaaccagaaggacgcccagttctatcgcgacctgctgggcctgatgaagctgctgctgcagatgcggaatagcatcgccaattctgaggaggattacctgctgtcccccatcgccgacaaaaatgggcatttcttcgacagccgcgagcggatctccagcctgcccgtggacgccgacgcaaatggtgcctacaacatcgccaggaagggactgtggattgtgcggaagatcagaaacacctctgagggcgagaaactgtccctggcaatcactaacaaggagtggctgctgttcgcacagtccaagccctatctgaatgattga

SEQ ID NO: 184 - DNA, 3750 bp, unidentified
  source 1..3750: mol_type = other DNA
atgaagaaactgacaaacctgtaccccgtgagcaaaaccctgaggttcgaactccaggctatcggcaagaccaaggagaatatcgaaaagaatggaattctgcagagagatgagaagcgcgccgaggactacaagatcgtgaagtccctgatcgatgaataccacaaacagttcattaaggatcgcttgtggaactttaagctgccattgcacaacgagggccacctggactccctggaggagtatcaggcactgtacgagatttccaagcggaacgacacccaggaagccgaattcactgagatcaaagacaaccttaggtcaattatcagcaagcgactgaccgagtgtggctctgcctacgagcggatcttcaaaaaggaactgatcagggaggacctgatcgatttcctggaaagcaacgaggataaggacatcgtgagacaatttgctgatttcaccacctatttcagcgggtttcacgagaataggagaaacatgtacgtggccgaggagaagtccaccgccatcgcctataggctgatccaccagaacctgcccaaatttatggacaacatgaaagccttcgccaagatcgccgagacctccgtggccgagcacttcaccgacatctacgagggctggaaagaattcctgaacgtgggcagcctggaggaaatatttaggctcgactatttctccgagacactgacacagccccatatcgaagtgtacaattacattatcggcaagaagatcctggaggatggcgccgaaattaagggcatcaatgagtacgtgaatctgtataaccagcagcagaaagacaagagcaaaagactgccattcctggtgcccctctacaagcagatcctgtcagaccgcgacaaactgtcctggctggctgacgaattcgactccgacgagaagatgctggccgcaatcaatgagtcatacaatcacctgcacgacctgctgatgggcctggagaatgagtctctgaggtccctgctcctgaacatcaaagactttaatctgtcccagattaatatctccaacgacctgagcctgactgatatctctcagcacctgttcggacgctacgatgtgtttacatcaggcattaaagacgagctgcggattatcacacctcgcaaaaagaaggagagcgatgaggagttcgaagaccgcatctccaaaatctttaaaactcagaagtcctttagcgtggactttctggacaagctgccacagcctgtcatggaagacgaaaaacccagaaccatcgaggattattttatgaccctgggcgccgtgaatactgaggccacacagaaggaaaactttttcgcccagatagagaacgcctacgaggatgcccgcaccatcctccaaattaaggacaccggagacaccctgagccagaataaaagtgccgtggccaaaattaaagccctgctggatgcactgaaggatctccagcacttcattaaacctctgctggggtctggcgaggaaaacgagaaggacgagttgttttacggaagcttccagatgatgtgggatgagctggacaccgtcacaagcctgtacaataaggtgaggaactggctgacacggaagcctttctccactgagaagatcaaactgaacttcgacaacagtcaactgctgggcggatgggacgtgaataaggagcccgactgtaaaggtatcctgctgagaaaggacgacttctattatctgggcatcatggacaagaaaagcaatagaatctttgaggccgatgtgacacccaccgatggcgagtgctacgacaagatcgactataagctgctgcccggcgctaataaaatgctgccaaaggtgttcttctcaaagtctaggatcgacgagttcgccccatccgaagctatcgtgagctcctacaagagaggcacccacaagaaaggcgccgtgttcaacctcgcagattgccaccggctgattgacttctttaagcagagcatcaataagcacgaggattggagcaagtttggattccatttttctgataccaaatcttacgaggacatcagcggcttttacagagaggtggaacagcagggctacatgctgtcatctcatcccgtgtcctcctcctacattgacacactggtgagcgagggcaagttgtacctgttcaggatctggaacaaggacttctctgaatctagtaagggcactcccaacctgcacacactgtactggaagatgctgttcgatgagagaaatctggtggacgtcgtgtacaagctgaacggtcaggccgaagtgttttatcgcaaagccagcataaagcctgagaattgcatcattcacaaggccaaccagcctatcgctaacaagaacgagctgaacaccaagcgggcctccaccttcaagtacgacatcattaaggacaaaaggtacacagtggataagttccagtttcatgtccccatcaccattaacttcaaggctgccggccagaacaacatcaaccccatcgtgcaggaggccatcaagcaggacgagttctcccacattattggcattgatagaggcgaaaggcacctgctgtacctgagcctgatcgatctgaaaggcaacatcgtgaagcagatgaccctgaatgagattatcaatgagtacaagggccagacctataaaacaaactatcacgacctgctggccaaaagagagggagacagaaccgaggcccgcaggtcttgggagaccatcgaaacaattaaggagctgaaggagggctacctgagccaggtggtgcatatcatctctaagatgatggtggagtacaacgcaatcgtggtgctggaagacctgaacaccgggttcatgcggggaaggcagaagatcgagagacaggtgtacgagaagtttgagaagatgctgatcgataaactgaattgctacatcgacaagcagttatctccaacagatgagggcggcctgctgcatccactgcagctgacctgtgacgctcagaagtggaagagaagccaccagtgcggctgtctgttctacatccctgcctggaatacctctaagatcgatcccgtgacaggcttcgtgaacctgctggatacccactacgacaccagagagaaggctagagtgttcttctccaaattccagaggatcagctacaatgctcccaagggctggttcgagttcgcttttgactacaacgatttcacaacaaaagccaaggggacccgcactcagtggacactgtgcacccagggcgagcgcattaggaccttccggaacccccagaagaatcatcagtgggacgacgagaggatcatgctgaccgatgcctataaacagctgtttgacaagtacgacatcgacatcaacggtaacatcaaggaagccattagcagtcagacagacgcccagttcttcaaagacctgatggggctgatgaagctgctgctgcagatgcgcaattccatcacaaacagcgaggaggactatctgctgtcccctgtggccaatggaacaggacatttctttgatagcagggaaggcatttcttctctgcctaaggacgccgacgcgaacggcgcatataacatcgcccgcaaggggctgtgggtggtgcagaagatccaggagacccctgagggcgagaagcctagcctgactatcaccaacaaagaatggctgcagtttgcccagacaaagccttacctgaacgactaa

SEQ ID NO: 185 - DNA, 3768 bp, unidentified
  source 1..3768: mol_type = other DNA
atgaaggagaaggagcagtactccgattttagccgtctctatcccgtgtctaagaccctgagattcgagctgaaacccatcggaagaaccatgaagaatattgaaaagaacggtatactggagcgggacaatcagagggccaacgattacaaaatcgtgaaggaatttattgacgagtaccacaaacagcacattaaggacagactgtgggatttcaaactccccctgaagagcgatggcaggctggacagcctgaaggagtatcaggagctgtatgagctgtctaagcgggacgccaatcaggagtcagcctttaccgaaatcaaggataacctgagaagcatcatcgcccggagactgacccacgattcccctgcctacaagagaattgataagaaggagctgatcagagaggacctgctggagttcctggagaacgaggaagataaggagatcgtgagacagtttgccgattttaccacttatttcaccgggttccaccagaacaggcagaatatgtatacagcagaggaaaagagcaccgccatcgcctaccgcctgatccaccagaacctgccaaagttcatggacaacatgaaggcttttgccaaaatcgccgagactagcgtggctgagcatttcgccgatatctacgaaggatggaaggagtacctgaacgtgggcagtatcgaaaagatcttccagctggattacttcagtgagacaatgactcagccacatatcgaagtgtacaactacattatcggcaagaagatcctggaggacgggacagaaattaaggggatcaatgagtacgtgaatctgtacaatcaacagcagaaggataagtcacagcgcctcccgttcctggtgcccctgtacaagcagatcctgtctgaccgcgagaagctgtcctggatggccgaggagttcgacagcgatgagaaaatgttggccgccatcaacgaatcttacgtgcatctgcacgatctgctgatgggcaccgaaaacgagagcctgagaagcctcctgtcccacatgaaggatttcaatctggagcagatcaacatcaacaacgacctgagcctgaccgacatctcacagcacctgttcggccgctacgatgtcttcactaacgggattaaggatgagctgcgggccattactccacggaagaagaaagagtctgacgaggactttgaggatagaatcagcaagatctttaaaacgcagaaatccttttcaatcagtctgctgaataagctgcctcagcctgtgatggaagacggcaagcccaggacagtggaggagtatttcatgagcctgggcgccgtgaacaccgagacaacccagaaggaaaacctgttcgcccagatcgagaacgcctacgagaacgcccggagcatcctgcagatgaaggacaccggcgatgccctgagccagaataaacaggccgtggccaagataaaggccctgctggatgccttcaaagacctgcagcacttcattaaacctctgctgggctcaggggaggagaacgagaaggatgagctgttttacggcgtgttccagctgatttgggacgaactggatacaatgacacccctgtacaataaagtgaggaattggctcacccgcaaaccttactcaaccgagaagattaaacttaattttgacaacgcacagctgctgggcgggtgggatgtgaacaaagagcccgattgcactggcgtgctgctgcagaaagacggcttctattacctggggatcatgaacaagaaggccaaccggatctttgagtctaaggtgacccccagcaatgaggattgctatgagaaaattgattacaagctgcttccaggtgccaataagatgctgcccaaggtttttttctccaagtccaggattgacgagtttgctccttccgaggccattgtggatagctacagacgcggaacacacaaaaagggccccgacttcaatcttagcgactgtcacagactgatcgacttctttaaggatagcattgccaagcacgaggattggtccaagttcgtgtttcatttctccgagaccagcacttacgaggacatctccggcttttatcgcgaagtcgagcagcagggctacatgctggctagtcacccagtgtcagtcagttatgtggaacagatggtggatgagggaaagctgtacctcttcagaatctggaacaaggacttctccgagcattcaaagggcacccccaacctgcacaccctgtactggaagatgctgttcgacgagagaaatctggccgacgtggtgtacaagctgaatgggcaggctgaggtgttttacagaagagcttccatcaagcccaagaaccggatcattcaccaggccaacagccccatcgccaacaagaacgaactgaacgagaagcgcacctccacctttaagtatgatattattaaagacagacggtacaccgtggataagtttcagtttcatgtgcccatcacaatcggatttaaggccatcgggcagaacaatatcaatcccatcgtgcaggacaccatacggcagggcgggttcactcatatcatcggaatcgacaggggcgaacgccacctgctgtacctgagcctgatcgacctgaagggcaacatcatcaagcagatgaccctgaatgatattgtcaacgagtataatggcgtgctgtacaagaccaactaccgggacctgctgaagaaaagggagggcgaacggacagatgcacgcagaagctgggagactattgaaaccatcaaggagctgaaggaaggctacctgtcccaggtggtgcacattatctccaagatgatggtcgagtacaacgccattattgtgctggaggacctgaacaccggatttatgaggggcaggcagaaaattgagcggcaggtgtacgaaaagtttgagaagatgctgattgacaagctgaattgttacatcgacaagcagacaaaccccgaagacgtgggcggcctgctgcacccactgcagctcacatgcgatgcacagaagtggaagaggagccaccagtgtggctgtctgttttacatccccgcctggaacacctccaaaatcgaccccgtcaccggcttcgtgaatctgttcgacactaggtacgagacacgagagaaggcccggctgtttttctccaagttccagcgcatcgacttcaacaccgagagcgactggttcgagttttcctttgactacaatgacttcacaaccaaagcagaaggcacccggactaagtggaccctttgcacttacggagagcggatcagaaccttcaggaatcctgagaagaatcatcagtgggacgacgaaaggatcgtgctgaccgatgagttcacccagctgttcgagcgctataacatcgatatccagggcaacctgaaagaggctatttctgcccagtctgacgcacagttttaccgggaactcctggggctgatgaagctgctgctgcagatgcgcaactcaatcaccaatagcgaggaggattacctgctgtcccccgtggcagacgaatcttcccatttttttgattcccgggagaacgtggagatcctgcccaacaatgctgacgctaacggcgcctataatatcgcccgcaagggcctgtgggtgatcaggcggattcaggaaaccgctgagaacgagaaaatcagcctggccatctccaacaaggagtggctgcagttcgcccagactcagccctacctgaacgactga

SEQ ID NO: 186 - DNA, 2364 bp, unidentified
  source 1..2364: mol_type = genomic DNA
ctccagctgaccgatacagaggacaaactcagtcagaataaaccagctgtgggcaagattaaggccctgctggacgccttcaaagacctgcagcacttcatcaagcctctgctgggctccggggaagaaaatgagaaggatgagctgttctatggcgccttccagctgatctgggatgaactggacaccgtgacccctctgtacaataaagtgaggaactggctgaccaggaagccgtatagcaccgagaaaatcaaactgaactttgacaacgcccagctgctggggggatgggatgtgaacaaggaaccggactgcaccggcgtgctgctgaggaaggacgggttctattacctgggcatcatgaacaaaaagagtaatcgcatcttcgatgctgacgtgacccctgccgacgggatttgctacgaaaagatcgattataaactcctgcctggggccaacaagatgctgcctaaggtgttcttttctaagagtcggatcgatgaattcgccccatccgaggccatcctgagcagctacaagcggggcacacataagaaaggcgccgacttctccctgtccgactgccaccggctgatcgatttcttcaaggcttccatcaacaaacacgaggactggagtaagtttggcttccaattctccgataccaagacctatgaggacatcagcggcttttacagggaggtggagcagcagggatatatgctgtcatcccaccaggtgagcgaagcctacatcaaccagatggtggaggagggcaagctctttctgttcaggatctggaacaaagatttctccgagtacagcaagggcaccccaaatatgcacactctctactggcggatgctgttcgacgaacgcaatctggccgatgtggtgtacaagctgaatggacaggccgaagtgttctaccggaaggcttccattaaggccgagaaccagattatgcaccccgctcatcaccccatcgaaaacaagaatacactgaacgagaagcgaagtagcaccttcgactacgacctggtgaaagaccggaggtacaccgtggacaagttccagttccacgtccccatcaccatcaacttcaaggccatcggccagaccaacgtcaatcccatcgtgcacgagaccattagacggggcggctttactcacgtgatcggcatcgatcggggcgagagacaccttctgtaccttagcctgatcgatctgaagggccatatcgtgaaacagatgaccctgaacgagattatcaacgagtacaatggcctggcccacaagaccaactactacgacctgctggtgaagcgagagggtgagcgaactaccgctaggcgcagctgggacaccatcgaaaacatcaaggaactgaaagagggctacctgagccaggtgatccacattatctccaagatgatggtggagtataacgccattgtggtgctggaggatctgaacatggggtttatgcggggaaggcagaagatcgagagacaggtgtacgagaagtttgagaagatgctgattgataaactgaactgctacatcgataagcaggccgacagtcagtctgagggcggcctgctgcaccccatccagctggccaataagttcgagagcttcaggaagctgggtaagcagagcggctgcctgttttatatccctgcatggaacaccagcaagatcgatccagtgaccggctttgtcaacctgttcgatacccggtacgaaactagggaaaaggccaagctctttttcagccatttccagcgtatctgctttaatgctgagaaggactggtttgaattcagttttgattacaacgacttcactaccaaagccgagggcaccaggacccagtggacactgtgctcttatggcaccagaatcagaaatttccgcaatcctctgcagaatcatcagtgggacgatgaagagattgtgctgaccgaggccttcaaggctctgttcgacaagtacgacatcgacatccatgccaatctgaaggaagccattaacgcccagaccgatgctcagttcttcaaggatctgatgggcctgatgaagctgctgctgcagatgaggaactccaaaactaacagcgaggtggactatctgctgagccctgtggctgatgagcacggccgcttcttcgatagtagagccggcgccggctctctgcctgacaacgccgatgccaatggcgcctacaacatcgccagaaagggactgtgggtgatccggaagatccaagagacccccgagggcgagaagctgagtctggccatcaccaacaaggaatggctggagttcgcccagacaaagccctacctgaatgactag

SEQ ID NO: 187 - DNA, 3795 bp, unidentified
  source 1..3795: mol_type = other DNA
ctgggcctgttcctgagactccggccaaagctgttcgtgatcctgtgcaagagcaactcaaacgtgatgaggaacctgaccaacctgtaccccgtgtctaagactctgcggtttgaactgcagcccatcgggaaaaccaaagagaacatcgagaagaatggaatcctgcagagggacgaaaagcgggccgaggactaccagaaggtcaagaacctgatcgacgagtaccacaagcagttcatcaaggacagactgtggaccttcgagctccccctggagattctggaggagtacaaagaactgtatgagacccctaagcgagacgaagccgcctttaccgaggtgaaggataacctgcgggccctgatcgcctcccagctgaaggccaagggaagtatctatgaccgcatcttcaagaaagagctgatcagagaagacctgatcgagttcctggataacgaggaggataaggagatcgtgagacagtttgccgactttaccacttacttcagtggctttcacaagaaccgggagaacatgtactccgcagaggagaagagcaccgctatcgcatacagactgatccaccagaatctgcccaagtttatggacaacatgaaggccttcgccctgattgctaaatcccccgtcgccgagcacttccccgatctgtactcagcctgggaggagtgcctgaacgtggcatccatcgaggaaatgtttcgcctggactatttctcccagacactgacccagaccggcatcgaagtgtataactatatcatcggcaaaaaaattctggaggatggcacagagatcaagggaattaacgagtacgtcaatctgtacaatcagcagcagaaggacaagaaggaaagactgcccctgctggtcccactttataaacagatcctgtctgatcgcgagaaactgtcttggttggcagaggagtttgactccgatgaaaagatgctgaacgcaattaatgagctgtatgcccaccttcatgacctgctgatgggcgaagagaacgagtctctgcactctattctcctgcagctgaaagaatacgacctgtctcagattaacattgccaacgatctgtctctgacagccattagtcagcagatgttcggcagatatgacgtgtttaccaacggaatgaaagatattctcaggaccatcactcctcacaagaagaaggagaccgaggaagatttcgaggagaggatcagcaaaatcctgaagatccagaagtctatctctatcgcagaactgaacaagctgcctcagcccattagcgaggatggcgggaaacccaaactggtggaagattatttcatgagcctgggggccgtggacgacggcgtaacccagaaggctaatctgttcgcccagattgaaaacgcccacaccgacgctctgtccgtgctgcagctgacaggtaccggcgacaccctgtcccagaacaagacagccgtggccaagattaaaactctgctggatgcctttaaggatctgcagcacttcattaagccactgctggggagcggcgaggagaacgagaaagatgagctgttttacggcagcttccagctgttttgggacgagctggacgctgtgacccccctgtacaataaggtgagaaactggctcacccggaagccatattccacagagaagatcaagctcaacttcgataatgcccagctgctcgggggctgggacgtgaacaaggagccagattgcactggcatcctgctgaggaaggacggactgtattacctgggaatcatgaacaagaagagcaacagaatcttcgatgccagcgtgacccctagtgacggagactgctatgagaaaatcgactacaaactgctgcccggcgccaacaagatgctgcccaaggtgtttttcagcaagtccagaattgacgagtttgcccccagcgatgccatcatcaattcctataagagagagacacacaagaaaggcgccaatttctccctgagggactgccacagactgatcgattttttcaaacagtccatcagcaagcatgaagactggagtaagttcggcttccacttttccgatacatccagttatgaggacatctccgggttctatcgggaagtggagcagcagggctacatgctgagctctcaccctgtgagcagtgcttatatccaccagatggtggatgaggggaaactgtttttgttcaggatttggaacaaggatttcagcgaatactctaaaggtacacccaacttacataccttgtattggaagatgctgttcgacgaaagaaatctggctgatgtggtgtacaaactgaacggccaggccgaggtgttctaccggaaagcctctatcaagcctgagaatagaatcatacaccccgccaatcaggacattaagaataagaatgctctgaacgagaaggccacttctcggtttgaatatgacattgtgaaggaccggagatacaccgtggataagtttcagttccacgtgcctctgaccatcaatttcaaagccactggacaggcaaatgtgaaccccgtggtgcaggaggccatccgcaagggcgagttcactcacattattgggatcgaccgcggcgagagacacctgctgtatctgtctctgatcgacctgaaagggagaatcgtgaagcagatgacactcaatgaaatcgtgaacgagtacaatggccactctcacacaacagactaccatggactgctcgccgatcgggagggccagcgcaccactgcaaggagatcttgggatactatcgaaaacatcaaggagctgaaagaaggatatctgagccaggtgatccacgtcatcacaaagatgatggtggaatacaaggccatcgtggtgctggaagacctgaacatggggtttatgagaggcagacagaagatcgaaaggcaggtgtatgagaagttcgagaaaatgctgatcgagaaactgaactgctatatcgataagcaggccgatcccaccgatgtgggcggcctgctgcacgccctgcagctgacaaacaaattcgagtccttcaagaaactgggcaagcagagcggctgcctgttctacatcccagcctggaataccagcaaaattgacccagtgactggctttgtgaatctgtttgataccaggtacgagacaagggagaagtccagactgtttttctctagattcgataggattgcctataatcaggacaaggactggtttgagttctcatttgactatgacaactttactactagggccgaagggtgcaggacccactggactctgtgcacccagggcacaagaatcagaaacttccggaacccacagaagaataaccagtgggatgacgaagaggtgaacctgaccgccctgttcaaacagctgttcgacctgtatgacatcgatatccacggcaacctgatggaggccatccagagacagacagaggccaagttctaccaggagctgatgcacttaatgaagctgaccctgcagatgaggaatagcagaatcaactccgaggtggactacctgctgagccctgtggctgacgaaaagggcaggtttttcgattccagatccggggattgtgtgctccccgacaacgccgacgccaacggcgcttacaacatcgctagaaagggcctgatgctgattcagaccatcagagaaacccccgatggcgagaagcccagcctgaccatcaccaatagggagtggctgcgattcgcccaggagaagccttacctggtcgactaa

SEQ ID NO: 188 - DNA, 3747 bp, unidentified
  source 1..3747: mol_type = other DNA
atgaagcagttcactaatctgtaccctgtgagcaagacactgagattcgagctgcagcccattggaagtacaaaggagaacattgagaagaacgggattctgtctagagatgagcagagggccgaagactacaagaaagtgaagaacctgattgataaataccacaaacagtttatcaaagaccggctgtggaattttcagctcccactggagaataaggggaacctggacagtctggaggagtatcgcatcctgtacgagacccccaagagggatgaggccgtgttcactgaggtgaaggacaacctgagggctctgattgtgaatcagctgaaggccaagggcagcgcctatgagcgcatcttcaagaaggaactgatccgggaagatctgattgagtttctggacatggaggaggacaagaaaacagtgagacagttcgctgattttaccacctacttcactggattcaacgagaacagggccaatatgtacagcgccgaggagaaaagtactgctatcgcatacagactgatccatcagaatctgcctaagtttatggacaacatgaaagcttttgcccaaatcgtgcagtcaccagtggccgaacactttaccgacctgtactcctactgggaagagtacctcaatgtggcctccatcgaggagatgtttcagctggatttcttcagccagaccctgacccagaccgggatcgaagtgtataactacatcatcggcaagaagattctggaggatggaaccgagatcaagggtatcaacgagtacgtgaactattacaaccagcaccagaaggataaaaagcagcgcctgcccctgctggtgccactgtacaagcagatcctgtctgacagagagcgcctgtcatggctcgctgaggaattcgattccgatgagaagatgctgaaggccatcaacgagctgtatgtgcacctgcacgacctgctgatgggaaaggagaacgagtcccttagatctctgctgctgaagctcaaggagtatgacctgagccagatcaatattgccaataacttctctctgaccgccatctgccaccagatgttcggcagatatgacgtgttcattaacggcatgaaggatattctgagagccattacaccccacaaaaagaaggagaccgaagaggagtttgaagagaggatttcaaagatcctgaagacccaaaagtctatcagtatcgccgagctgaacaagctgccacagcccgtgtgcgaggactgctgcaagcccaaactggttgaggattacttcatgtccctgggggcagtggatgatggcgtgacacagaagctcaacctgttcgcccagatcgagaacgcccacacagatgctctgagcgtgctgcagctgaccggcacaggagatacgctgtctcagaataagcccgccgtggccaagatcaaaaacctgctggacaccttcaaaaatctccagcattttatccagccactgctgggcagcggcgaggagaatgagaaggacgaactcttctatggctcctttcagctgttctgggacgagctggatgctgtaaccccactgtataacaaggtgaggaactggctgacacggaagccttactccaccgagaagattaaactgaatttcgacaatgcccagctgttgggcggctgggacgtgaacaaagagagcgactgcaccggcgtgctgcttagaaaaggggcctattactatctgggaatcatgaacaaaaaggccaataggattttcgatgcctgtatcaccccctcaaacggcgactgctatgaaaagatcgattataagctcctgcccggcgcaaacaagatgctgccaaaagtgttcttttctaagagccacatcgatgagtatgcccccagcgacgtgatcatcgagaattataaaaagggcacacataagaagggcgccgacttcagcctgcaggactgccacagactgattgatttctttaagcagtccatctcaaagcacgaggattggtctaaattcggctttcagtttagccccacctgctcatacgaagatatcagcgggttctatcgggaagtggagcagcagggctatatgctgtccacacaccctgtgtctagcgcctatatcgatgagatggtggccgagggcaagctgttcctgttcaggatttggaataaggatttttccgaatactctaaaggcactcccaatctgcacaccctgtattggaagatgctgttcgacaagagaaacctggccgatgtggtctacaagctgaacggccaggccgaagtgttctacaggaaggctagcatcaaaccagacaaccggatcattcaccctgctaaccaagatatcaagaacaagaacgccctgaacgagaacaagacttctaggttcgagtatgatatcatcaaagaccacagatacaccgtggataagttccagtttcacgtgcccattacaattaacttcaaggccatcggccaggccaatattaatcccattgtgaacgatgccatcaggaagggcgtgttcacacacatcatcggaatcgatcggggagagcggcacctgctgtatctgtccctgattgatctgaaggggcgcattatcaaacagatgaccctgaatgagatcgtgaatgagtacaacggccactcccacgccaccaattatcgggacctgctggccaacagagagggcgagagaactaccgcccgcaggtcttgggataccatcgagaacatcaaggagctgaaggaaggctacctgagccaggtgatccacgtgattaccaagatgatggtggaatacaaggccatcgtggtcctcgaagacctgaataccggcttcatgaggggaaggcagaagatcgagagacaggtctacgagaagttcgagcggatgctgatcgagaagctgaattgctacattgacaaacagacaacccccaccgccgagggcggcctgctgcatgccctgcagctgaccaataaattcgagagctttaagaagctggggaagcagtccgggtgcctgttctacatccctgcctggaatacctctaagatagaccccaccaccgggttcgtgaatctgttcgacaccagatacgaaactcgggagaaatcgcggctgttcttcagcagatttgatagaattgcctataacagagacaaagattggttcgaattctcatttgattacaataatttcacaaccaaggccgaggagtgtcggaccaggtggaccctgtgtacccagggaacccggattatcaactttagaacccctcagaagaacaatcagtgggaggacgaggaagtgaacctgaccgtgctgttcaagcagttgttcgaccggtacgacatcaacatccatggaaatctgatggagacaattcagcagcagaccgaggccaagttctaccaggaactgatgcacctgctgaagctgacactgcagatgcgcaactctaggaccaactccgaggtggactacctgctttcccctgtggctgatgagcacggacacttcttcgatagcagggaggacatcgaaactctgccaaacaacgccgacgccaacggggcctacaacattgcccggaagggcctgtgggtgatcagaaagatccaggagacaccagagggcgagagaccctccctggccatcacaaataaagagtggctgcagttcgcccagactaaaccctacctgaatgattga

SEQ ID NO: 189 - DNA, 3822 bp, unidentified
  source 1..3822: mol_type = other DNA
atgactcagaaattcgacgacttcattcacttatactctctgagtaagactctgcggttcgaggcaaggcccatcggtgacactctgcgcaactttattaaaaacgggctgcttaaacgggacgaacatcgagccgagtcatacgtgaaagtgaagaagctgattgacgagtaccacaaggcgttcattgacagagttttgtctaacgggggactgaattatgaggataaaggggagtatgactccctgactgagtactatgtcctatattccacgacccgccgggacgaaaccacccagaaacattttaaagccacacagcagaacctgcgagatcagatagtgaaaaaactcacagatgacgacgcttataagcaccttttcggcaaggaattgatcgaatcctacaaagacaaagaagataagaagaagctccatgaggcagatctggtacagttcattaataccgccaatccgaaacagagactgaatttctctaagaaggaggctattgaccttgtcaaagagttttgtgggttcaccagttattttggcgacttccacaagaatagaaagaatatgtacagcgccgaagaaaagtcaaccggtatcgcgtatcgcttgatcaatgagaatctgccaaaattcattgataacatggagtccttcaagaaaattgctgcaatcccagaaatggaagataacctgaaagagattcacgacaattttgccgagcacttaaatgtcgagaacattcagaacatgttccagctcaactattataaccagttgcttacccagaaacagatcgatgtgtacaatgccataatcgggggtaaaacggatgaggagcataaagaaaagatcaaggggattaacgaatatgtgaacctctataaccaggctcacaaggacgctaagttaccaaagcttaagaccctgtttaagcagatactctctgaccgtaacgcaatctcctggctgcccgaggagttcgacaatgaccaggaggccctcaacgctatcttagactgttacgcgcggctcagtgaaaatgttctggggaaggagaatcttaaacggctgctgtgcagcttgagcgaatatgatactaagggtatatttctgcggaatgatctccaacttacgtcaatctcaaaaaagatgtcaggtagttggactgatatcccctctgcaatcaaaaatgacatgaaggatggagcccctgccaaaaaaagaaaagaaagcgaagaggattacgaaaagcggatcgacaacctgtttaagaaactcgactctttctctataggctacatcgacgattgtttgaacaagttcgacaacaacaatacctttacaatcgaaggatatttcaaggaattgggagcaaaagatacccagtcagaagacatcttcaagcaaatcgctaacgcatacacagacgtcaagcctctcctgaactctccttaccccaagtccaagaatctgagccaagataaggagaacgtcaaaaagattaagaggttccttgacgccctgatgtccctggttcactttgtgaaaccattgctgggaaatggcgatgagagcaataaagatgagaagttctacggagagctctcactactgtggacagagttagagacaatagtgcctctttataacatggtacgaaattacatgacacggaagccatacagtaactccaagatcaaactcaatttcgaaaatagccaactgcttggcgggtgggatgtaaataaagaaaaggagcgcgcttccatcctactcagacgcaatggcctgtactatctggctattatggataaagactctagcaaactgttgggcaaaagtatgccaagcgacggtgagtgctatgagaagatggtgtataaacaaatctcgtttaacagcggctttggggggttcattaggaagtgctttaactcagctacggaattaggatggaaatgtagccctacatgcctcaataaggatggcaagataataatactcgacgaggaagctacagacataagaccagagctcattgacaactataaatcattcctcgatatctacgagaaagatggctataaatacaagaactttgggtttcacttcaagaaatcgtctgaatatgagaacatcaacgatttcttcaaagaagtcgagcagcaaggatataagatcaccttcacgaatgtctcagtggcatttatcgacaagctggtgaaagaaggaaagatgtaccttttccaaatctactccaaggatttttccgagtactctaagggcacaccgaatatgcacactctgtactggaaagccttgttcgatgataggaacctaaaggatgttgtgtacaagctagacggccaggctgagatgtttttccgaaaaaagagcatcaactgtaatcacccaacacatcctgccaatcagcccattcagaacaagaacaaggataacaagaaaaaggagagtgtctttaagtatgacctcactaaggacaggagatatgccgtggataagtttatgtttcatgtgcctatcaagatgaactttaagtccactgggacagagaacatcaacctgcctgtgagagagtacctgaaaactagtaatgacactcatattatcggaattgacagaggcgagaggcacctgctctacctggtggtcattgatttacacggtaacatcgtggaacagtattcactcaatgatatcgtaaatgagtacaatggcaatacttacaggaccaactaccatgatctgcttgatgctcgtgaagaagacaggctgaagcagaggcagtcgtggcaaacaattgagaacatcaaagaactgaaggagggttacttaagtcaggttatacacaagataacccagctgatgatcaagtaccatgcaatcatagtgttagaagatctgaacatgggatttatgcgtggccgtcaaaaagtggagaagcaggtctaccaaaagttcgagaagatgctgattgataagctaaattacctggtcgataagaaggcggacattgagagcactggaggtctgcttaacgcctatcagttgactaataagtttcccggtttcaaaaacctgggcaagcagagcgggtttcttttctacattcccgcatggaacaccagcaaaatcgaccccgtaaccgggtttgttaacctgctcgacattcgcaatgttgataaggccaaggcattcttcgccaaatttgacagcatttggtacaataaagagaaggactggtttgagtttgccttagactatgataaattcggcagcaaagccgagggcaccagaactaaatggaccctttgcacccagggcaaacgcatcaagacattcaggaatgccgacgaaaactccaactgggattatcagattatagacttgaccaaggatctgaagcaactatttgcccaatacaatatcgacatcaatgggaacctaaaagaagcgatctctaatcagacagaaaagacgtttttcgtggagcttttgggcctgctgaaactgacattgcagatgcggaacagtattaccggaacggaaaccgattatttggtgagtccggttgccgacgaaaatggaaatttctatgattcccgaacatgcgggcatagcctccctgaaaacgccgacgctaacggagcttttaatatagcacgcaagggcttgatgattattgaacagattaaagcgtccgacaacctctccaagctcaaatttgacatttctaacaaatcctggctcaatttcgcacagcaaaaaccctacaaacatgagtga

SEQ ID NO: 190 - DNA, 3813 bp, unidentified
  source 1..3813: mol_type = other DNA
atgaaaagaaagttcgacgatttcatccacctgtacagcctgagcaagactctgcgattcgaggccagccccatcggagacacactgcggaatttcaaaaagaatggcctgctggagcgggataaacacagagccgagtcatacgtgaaagtgaaaaagcttatcgacgagtaccacaaggtgtttatcgatagagtgctgaacggcagcgtgctgaactacgtgaacaagggcaagtatgactccctgacagagtactatgacctgtacagcgtcccaaagaaggatgaaacctctcagaagcacttcaaggccatccagcagcacctgagacagcagattgtgaagaaattcaccgacgacaaaaactacaagagactctttggcaaagagctgctggagtcctacaaggataaagaggacaagaagaagctgaatgaggccgacctggtgcagttcattaatgccgccaaccccgaacagctgctgtccctgagcaagaaggaggccatcgatctggtgcaggaattttccggattcaccacttacttcaacgagtttcacaagaacaggaaaaatatgtacagcgccgaggaaaaaagtacaggcatcgcctacaggctgatcaacgagaatctcccaaaattcatcgataatatgaagagcttcaagaagatcgtggacatcccagagatgaaggataatctcaagcagatccacgaatatttcgtggactacctgaacgtcgaaaacatccacgaaatgtttcagctggactactataaccagctgctgacccagaagcagatcgacgtgtacaatgcaattatcggagggaaaaccgacaatgagcataaggagaaaatcaaagggatcaatgagtacgtgaacctgtacaaccagacccacaaggacgccaaactgcccaagctgaaggtgctgtttaagcagatcctgagcgacaggaacgccatcagttggctgccagaggagttcaaggatgatcaggaggtgctgaacgccatcaaggattgctacgcccggctgtctaaaaacgtgctgggagataatatcctgaaagaactgctgtgctcactggccgaatacgacaccaagggcatcttcctgcggaacgacctgcagctgaccgatattagccagaagatgtttgggaactggtcagtgattcccagcgccattaagaaggatgtggcccctgcaaagaagcgtaaagagctggaggaggactatgagaaacggatcgacaacctgttcaagaaacgcgaaagcttcagcattgactatatcgacagctgcctggataaattcgacgagaacaacactcacacaatcgaggggtactttgccacactgggcgccgttgatacccccaccacacagagagagaacatctttgcccagatcgctaacacctacacagacctggaaccactgctgaagtcaccctacagcaagaataagaacctgagtcaggacaaggacaatgtcgccaagattaagctgtttctggatgccctgatgagcctgatgcacttcgtgaagccactgctgggcaagggggacgagagcaacaaggatgagaagttttatggcgacttcacactgctctggaccgagcttgagaccgtggtgcctctgtataacatggtgagaaactacatgaccagaaagccttactcaaaatccaaaattaagctgaatttcgacaacagccagctgctgggcgggtgggacgccaacaaggagagcgactacgctagcatcctgctgcgcagagatgggaagtactacctggccatcatggacaaggattctaagaaactgctgggcaagagcatgccttctgacggcgagtgctacgaaaagatggtgtataagctgctgccaggcgccaataagatgctgccaaaggtcttctttgccacaagccgcattaaggacttcaagccatcagagcagctgctggagaactacaacaagggaacccacaaaaagggagtcaatttctccatctctgattgccatgccctgatcgattactttaagcagtccattaataagcacgaggattggaagaatttcaactttaacttcagcgagacatccacatacgaggacctgtcagccttctacagggaggtggagcagcagggctacaagatcacctttaccaatgtgagcgtgtcatttatcgacaaactggtggaggagggcaagatgtacctgttccagatctataacaaagatttttcagagtactccaagggcaccccgaacatgcatactctctattggaaggccctgttcgacgagcggaacctgaaggatgtggtgtacaagctgaatggccaggccgaaatgttcttcagggagaaatccatcaaggtcagcacaatccaccccgctaatcgccctatccagaacaaaaataaggacaacaagaaaaaagagtcaatcttcgagtacgacctcatcaaggacaggcgctacaccgtggataagttcatgttccacgtgcccatcactatgaactttaagtctgccgataccgagaacattaatctgcccgtgagagaatacctgcagacttctgacgacacacacatcatcggaatcgatcgcggcgaacggcatctgctgtacctggtcgtcatcgatttgcagggcaatatcgtggagcagtatactctgaatgatattgtgaacgaatacaacggcaacacctacaggacaaactatcatgatctgctgaacgctagagaggcagagaggctgaaggccagacagtcttggcagaccattgagaacatcaaggagctgaaggaggggtacctgtctcaggtgatccataagatcacccagctgatgattaaataccacgccatcgtggtgctggaggatctgaacaagggctttattcgcggccgccagaaggtggagaagcaggtgtatcagaagttcgagaaaatgctgatcgataagctcaattatctggtggacaaaaaagctgatatcgagaccaccgggggcctgctgaacgcctaccagctgaccagtaaattcgagtctttccagaaactgggaaagcaatccggtttcctgttttacatccccgcctggaacacaagcaagatcgatccagtgaccggcttcgtgaatcggctggacaccaggtaccataacgtggacaaaagtaaagcttttttcgctaaatttgatagcatccggtacaacaaagaaaaggactggtttgagttcgccctggactataagaactttggaaacaaggccgaagggacaagaacaaagtggaccctctgcacccagggcaaacggatcaagacattcaggaacgccgagaaaaatagcaattgggactaccagatcatcgacctgactaaagaactgaagcagctgttcgcccattacgacatagacatcaatggcaatctgaaaaaggctatctctaaccagactgagaagacatttttcgtggagctcatgcagtttctgaagctgaccctgcagatgcgtaattcaatcaccaacactgagaccgattatctggtgtccccagtggccgatgagaatggcaatttctacgacagccgcaaatgcggctcctcactgcccgagaatgccgacgctaacggcgcttttaacatcgctaggaaggggctcatgatcatcgagcagatcaaggcaagtgacgacctgtccaagctgaagttcgacatttctaacaaaagttggctgaacttcgcccagcagaaaccctacaaacatgaatga

SEQ ID NO: 191 - DNA, 3366 bp, unidentified
  source 1..3366: mol_type = other DNA
ctggtccagttcatcaataccgccaatctgaagcagagactgaacctgagcaaagaagaagccaaagacctggtgcaggaattttgtggcttcaccacatattttggcgacttctaccagaaccgcgaaaacatgtactccgccgaggagaagtccaccggcatcgcctaccggctgatcaacgagaatctgcccaagttcatcgataatatggagacttttaaaaagatcgctgccatccccgagatggaggacaacctgaaggaaattcacgacaatctgtctgagcacctgaatgtggagaacatccaggacatgtttcaactgaattactataatcagctgctgacccagaagcagatcgatgtgtacaatgccattatcggcgggaagaccgatgatgagcacaaagagaagattaagggcattaacgaatatgtcaatttatacaaccaggctcacaaggacgccaaactgcctaagctgaagaccctgtttaagcagatcctgtctgacaggaatgctatctcctggctgcctgaagagtttgacaacgatcaggagaccctgaacgccatcaaggactgctatgcccacctgtccggcaacatcctgaaggacgagaacctgaaacggctgctgtgctccctgagcgagtacgataccaaaggcatcttcctgagaaatgatagccaactgacctccatctccaagaaaatgtccgggtcttggacagacatccccagcgccatcaagaatgacatgaaggacggagtgcccgctaagaagagaaaagagagcgaagaggattatgagaaacggatcgacaacctcttcaagaagcaggactctttcagcatcgattacatggatgcctgcctgaataagttcgtggaaaacaacccttacactattgaggggtatttcaaagagctgggggctaaggatactcagagcgaagatatctttaagcagatcgagaacgcctacaccgacgtgaaacctctgctgaatagcacatatcctaagaataagaacctgtcccaggacaaggagaacgtggccaagattaaacgcttcctggataccctgatgagtctggtgcacttcgtgaagcctctgctgggaaaaggcgacgagaggaacaaggacgaaaaattctatggcgagctgtccctgctgtggacagaactggaaaccatcgtgcctctgtacaacatggtgagaaattacatgaccaggaagccttactccaacagcaaaatcaagctgaattttgataactcacagctgctgggaggatgggacgccaacaaagaaagcgattacagctccatcctgctgtatagggatggaaagtactacctggccatcttcgacaaggattctaagaaactgctcgggaaaagtatgccctccgacggggagtgctacgagaagatggtgtataagctgctgcctggagccaataaaatgctgcccaaggtgttcttcgccaagagcaggattaaggactttaaacccagcgagcaactgctggaaaagtataacaaaggtactcacaaaaagggcaagaatttctccatcagcgactgccacgcactgattgactttttcaagcagagcattaacaaacacgaagattggaaaaactttgacttcaactttagtgagacctccacctacgaggacctgaactccttttatagggaggtggaactccagggctataagatcacattcactaaggtgagcgcttccttcatcgacaagctggtggaagaaggcaaagtgtacctgttccagatctacaataaggacttcagtgagtattctaagggcactcctaacatgcacaccctgtactggaaagccctgttcgacgatagaaacctgaaagatgtggtgtataaactgaacggccaagccgagatgtttttcagaaagaagtctatcaactgcaaccaccccacacacccagcaaaccagcccattcagaacaagaacaaggacaataaaaagaaggagagcgtgtttgaatatgacctgatcaaagaccaccggtataccgtggataaattcatgttccatgtgcccattacaatgaattttaagtccacaaacgagaaggatatcaatctgcacgtgcgcgagtacctgcagaccagtaatgacacccacatcattggcatcgaccggggcgagcgccatctgctgtatctggtggtgatcgaccttcacggcaatatcgtggaacagtacacactgaacgacatcgtgaatgagtataatggcaatacctacaggaccaattaccacgacctgctggacgcaagggaggaggacaggctgaagcagaggcagtcctggcagaccatcgagaacatcaaggaactgaaggagggatatctgtctcaggtgatccacaaaatcacccagctgatgattaaataccacgccattatcgtgctggaagacctgaatattggcttcatgaggggcagacagaaagtggagaagcaggagtaccagaagttcgagaagatgctcatcgacaagctgaactacctggtggacaagaaagctgatatcgagagcaccggaggcctgctcaacgcctatcagttgaccaataagttcgccagctttaaaaagctggggaagcagtccggctttctgttttacatccctgcctggaatacgagcaaaattgatcctgtgactggcttcgtgaatctgctggacacccgttatcagaacgtggacaaggctaaggctttcttcgccaaattcgatagcatcaggtacaacaaggacaaggactggttcgagttcgccctggattacaacaatttcggcagcaaggccgagggaaccaggaccaaatggacactgtgtacacagggaaagagaatcaagacatccttcaataagatgagttccaaatggaacaaccaggaaatcgaccttactaaggatctgaaacagctgtttgtgcagtacgatatcgatatcaacggcaacctgaaagaggccatctctaaacagaccaaatatacctttttcgtggagctcatgggcctgctgaagctgaccctgcagatgagaaattccatcaccggaaccgagacagactacctggtgtcccccgtggccgacgagaatggcaatttctatgactccagaacctgtggccccagccttcctgagaacgccgatgccaacggcgccttcaacatcgcccggaagggtctgatgattatcgagcagattaaggcatccgacgacctgagcaagctgaagttcgatatcagcaataagagctggctgaattttgcccagaagaagccctacaagcacgaatag

SEQ ID NO: 192 - DNA, 3924 bp, unidentified
  source 1..3924: mol_type = other DNA
atggccaagaaattcgaggactttaccaaactgtatcctctgtccaagaccctgtgcttcgaggccaggcctatcggagccactaagtccaatatcattaagaatggactgctggacgaagacaagcatagagctgagagctacgtgaaagtgaagaagctgattgacgagtatcacaaggcctttatcgacagggtgctggccgacgggtgtctgtgttacaagaacgagggaaacgaggactcactggaggagtattacgagttctacagcctctcctccaaggataaaagcgatgacaccagaaagcactttgctacaatccagcagaacctgcggtctaaaatcgccgagaccctgaccaaggacaaagcctacgctaaccttttcgggaacaaactgattgaatcacataaagataaggaggataagaacaatatcattgatagtgatctgatccagtttgtgagcaccgctacccccgatcagctggacagccagagcaaagatgatgccaccaaactgattaaggagttctggggatttactacctacttcaccgggtttttcgaaaatcggaaaaacatgtacacaagcgaagagaagtccacagggatcgcatacaggctgatcaatgagaacctgcccaagtttattgataacatggaaagcttcaaaaagatcatggagaaacccgaaatgtccgccaacatggaggaactgagagccaacctggaagagtacctgaacgtggaatccatctccgaaatgttcgagctgaattactacaacatgctgctgactcagaagcagatcgacgtgtataatgccgtgatcggcggcaagaccgacgaagaacaggatatcaaaacaaagggaattaatgagtacgtgaacctgtataatcagcagcacaaagacgccaagctgcccaagctgaagaccctgttcaagcagattctcagcgacagaaacgctatttcatggctgcccgaagagttcgacaaggaccagaatgtgctgaatgccatcaaggactgttacgtgagactgaccgcaaacgtgctgggcaacaatgtgctgaacagcctgctgagcactctgtctgagtacaacacagagtcaatcttcatcaggaacgacatccagctgactaacatttcccagaagatggccggcagctggaactacatccaggacgccatcaagcaggacatcaagaacgtggcccctgcccgtaagagaaaagagagcgaggaggactatgaggagagaatctctaaaaacttcaagaaggccgactcctactccatcaaatacattgacgactgcctgaatcgcgcctacaagaacaacacctacacagtggagggctacttcgccacccttggcgccaccaataccccttccctgcagagggagaatctgttcgcccagatcgctaacgcctatacaaacatctccagcctgctgtctagcgactactccgccgaaaaaaacctggcccaggataaggagaatgtggccaagatcaagaccctgctggactgcatcaaatcactccagcatttcgtgaaaccactgctgggaaaaggggacgagtcagataaagacgagaggttctacggcgagctgagcatgctgtggaaagaactggatactgtgacccctctgtataacatggtgaggaattacatgacccgcaagccttacagccagaagaagatcaagctgaacttcgaaaacccccagctgctgggaggctgggatgccaacaaggagaaagactacgccagcatcctgctgcgcagggacggcaaatactatctgggaattatggacaaagagagcaagaagctgctcggaaagcccatgcctagcgatggcgattactacgaaaagatggtgtacaagttttttaaagatattacaaccatgatcccaaagtgtagcacccagctgaaggccgtgaaggagcacttttctaagagcaacgctgacttcgtgctgtccggcaaaaacttcaataccccactgatcatttccaaagaggtcttcgaactgaacaatgtgaagtatgggcagttcaagaaattccagaaggactatgtggccaccaccaacgatatcgaagggtacgcccacgccgtgaagatctggattaagttctgcatggatttcctgggcacctacgacagcactatttcttatgacctgtcaagtctggccagtaacgagtataccagcttggatacattctaccaggatgtgaatcgcctgctgtatgccgtgagcttcatcaaagtgagcgtgtctcatatcgactccctggtggaggaaggaaaaatgtacctgttccagatctataataaagacttcagcgaatatagcaagggtacccccaacatgcacaccctgtactggaaggccctgttcgatgagaggaatctggccgacgtggtgtataagctgaacggacaggccgagctcttctatagagagaagtccatcgattgcacacaccctactcacccagccaaccacccaatcttgaataagaataaggacaacgaaaaaaaggagtccatcttcgagtacgacctcatcaaggaccgccgatacaccgtggataagttcatgttccacgtgcccattactatgaatttcaaaagcaccggggccgacaatatcaatcagctggtgagagagcacctgaaggacgccgacgccccccacattatcggaatcgacagaggtgagagacacctgctctatctggtggtcattgatatgcacggcaacatcaaagagcagttcaccctgaacgacatcgtcaatgagtataatggcaacacctatcggaccaattatcacgatctgttggatgctcgggaggacgcaaggctgaaggccaggcagagctggcagacaattgagaatatcaaggagctgaaggaaggctacttgtctcaggtgattcacaaaatcacccagctgatggtgaagtaccatgctattgtagtgctggaggacctgagcatgggtttcatgaggggcaggcagaaggtggaaaaacaggtgtatcagaagtttgagaagatgctgatcgacaagctgaactactatgtggacaagaaggccaacgccgagcaggctggaggtctgctgaatgcctaccagctgacctccaaattcgactctttccagaagctcggcaagcaatctggatttctgctgtacattcccgcctggaacacatccaagattgacccagtgaccggctttgtgaatctgctggacacccgctaccagaatgtggaaaaggccaaagccttcttctgcaaattcgaggccatcagatataactccaacaagaattggttcgaatttaccattgattacaacaacttcggccagaaagccgagggcacaaggacaaaatggaccctgtgcacacaggggaagagaatccggacctttaggaaccccgagaagaactccgagtgggacaatcaggagatcgatctgaccagcgccctgaagaacctgtttgcccactaccacatcgacatcaatgggaacattaaggaggccatctccgcacagtctgacaagaccttttttaccgagctgctgcatctgctgaagctgaccctgcagatgcggaacagtatcactggaactgaaacagattacctgatttctcccgtggccgacgacaatggctatttctatgacagcaggacctgtaatgatactctgcccaagaatgccgacgccaacggcgcctacaatatagccaggaagggcctgatgctgatcgagcagattaagaaggcaaaggatatcgctaatatcaaattcgatattagcaataagtcttggctgaacttcgctcagcagaaaccttataaggacgagtaa

SEQ ID NO: 193 - DNA, 3825 bp, unidentified
  source 1..3825: mol_type = other DNA
atgattaaggagttcgaggacttcaaaaggctgtatcctatccagaaaaccctgaggttcgaggctaaacctatcggaagcaccctggaacacctggtgaagtcaggtatcctcgatgaagacgagcatcgggccgccagctacgtgagggtgaagaagctgattgatgagtatcacaaggcctttatcgatagagtgctgaacgacggatgcctcccctttaagaataagggcgagaagaattccattgaagagtactacgaatcatacaccagcaaggataaagaggaggatagcaagaagaggttcaaagagatccagcagaacctgcgaagcatcatcgtgaataagctgacaaaagacaaggcctatgccaacctgtttgggaactacctgatcgaatcccataaggataaggaagacaagaaaacaatgatcgacagcgacctgatccagtttattaaagacgccgactctctggagctgggctctatgtctaaggacgaagccatcgagctggtgaaggagttttggtccttcaccacctactttgtgggcttctacgacaataggaagaacatgtatagcgccgaggaaaagagcacagccattgcctaccggctgatcaacgagaacctccccaagttcattgataacatggaggccttcaagaaaattataagcagacctgagattcaggccaacacggagcagctgtacagcgactttgcagagtacctgaacgtggaatccattcaggagatgttccagctggattattatgacattctgctgactcagaaacagatcgacgtgtacaacgccatcattggggggaagaccgacgagaaacacgacatcaagaccaagggcatcaatgagtacattaatctatataaccagcagcacaaggaggacaagctccccaagctgaaagtgctgttcaaacagatcctgagcgaccgaaatgccatctcctggctccctgaggagtttaactccgaccaggagatgctgatctctatcaaagactgctacgagaaactgtgcgtgaacgtgctgggcgacaaggttctgaagagcctgctgtcctccctggacgactatgagctggagggcatctttctgcagaatgaccagcagctgacaaatatcagccagaagatttttggctcctggagcgtgatccaggaagctattattaggaatatcaagaataccgcccccgccaggaagcataaggagacagaggaggattacgagaagaggatcttcagcatttttaagcaggctgggagcttcagtattaaatacatcgacgactgcctgtatgacctggacaagaataacatcaacacaattgagaactactttgccactctgggcgccgagaatacccccgagatccagagagagaatctctttgctctgatcaagaacgcctatactgatgtggccggactgctgtgcagcgagtaccctactgagaagaatctgtcacaggatgaaaatcacgtggccaaaattaaggccctgttggatgctatcaagagcctgcagcactttgtgaaacctcttctgggcaatggagacgaacacgataaggacgagaggttctatggagagctggtgtccctctggacagagttagacaccgtgactcccctgtacaacatggtgcgcaacaggatcacacagaaaccttatagccagaagaagatcaagctgaatttcgagaacccccagctgctgggaggatgggacgccaacaaggagaaagactactcctgtatcatcctgcgccgggagggcatgtattacctggccatcatggacaaggatagcagaaagctgctgggcaaagagatgcctagcgacggcgagtgttacgagaagatggtttacaagctgctgcccggcgctaataaaatgctgcccaaggtgttcttcgccaagtcccggatcgaggagttcatgccctccgagcagatcatcgaaaagtacaacaacggcacccataaaaagggcaaggatttcaacatcaccgattgccacaacctcattgactactttaagcagtctatcaataaacacgaagactggtccaagttcgggtttactttctcagagactagcacctacgaggacctcagcgggttctacagggaggtcgagcagcaggggtataagctgagtttcaccaatgtttccgccagctatatcaatagcctggtggatgagggaaagatgtatctgtttcagatttacaacaaggacttctccgaatacagcaagggcactcctaacatgcacaccctgtattggaaggcactgttcgatgagcagaacctggccgacgtggtgtacaagctcaatggccaggccgagatcttttacaggaagaagagcatcgatgccacccaccccacacacccagccaacagacctgtgcagaacaagaacaaggacaacaagaagaaggaatccctgttcgagtacgacctgatcaaagaccggagatacagcgtggacaaatttatgtttcatgtgcctatcaccatgaattttaagtccaatggctccgagaatatcaaccagcaggtgaaagagtacctgcagctggccaacgacacccacatcattggcattgacaggggagagcgccacctgctgtacctggtggtgatcgacatgcatgggaatattaaggagcagtttagcctgaatgagatcgtgaatacctacaaaggaaatatctaccacactaattatcacgacctgctggaggcccgggaggaggagaggctgaaagcccggcagagctggcagacaatcgagaacattaaggagttgaaggagggctacctgtctcaggtggtgcacaaaatcacccagctgatggtgaagtatcacgccatcgtggtgctggaggacctgaacatgggattcatgaggggccggcagaaggtcgagaagcaagtgtatcagaagttcgagaagatgctgatcgacaagctgaattacctggtgaacaaacaggctaatattacagaggccggggggctgctgaatgcctatcaactgacctcaaaatttgacagttttcagaagctgggcaagcagagcggcttcctgttctacattcctgcctggaacacctccaagatcgaccccgtgaccggcttcgtcaacctgctggataccaggtaccagaatgtggagaaggccaaggcctttttcagcaaatttgacgccatcagattcaaccaggataaagactggtttgagttcaacctggactacaacaaatttggggagaaggccgagggaaccagaaccagatggactctgtgtacccaggggaagagaatatacacattcagaaacgaggataaaaattctcagtgggacaacattgagatcgatctgacttccgaaatgaaatccctgctggagctgtaccacatcgatattcagggcaatctgaaggaggccatcaatagccaaaccgataagtccttctttacaaagctcatccacctgctgaagctcacactgcagatgaggaactctattacccgcacagagactgactacttgattagccccgtggccgacgaggatggcgagttctacgacagcagatcctgtggtcctgagctgcccaagaacgccgacgccaacggcgcatacaacattgctagaaaaggcctgatgctgatcaggcagatcaaggaggcaaaagagctggataagatcaagttcgatatctctaacaaagcctggctgaatttcgcccagcagaaaccatacaagaatgactga

SEQ ID NO: 194 - DNA, 3960 bp, unidentified
  source 1..3960: mol_type = other DNA
atggctaagattttcgaggatttcaagcggctgtaccctctgagcaagacactgagattcgatgctaagcccgtgggcgctaccctggacaacatagtgaaaagcggcctgctggaggaagacgagcacagggccgcctcctacgtgagagtgaagaagctcattgacgagtaccacaaggtgtttattgaccgggtcctcgacaatgggtgtctgcccctggagaacaagggcgaaaataattcactggccgagtactacgactcctatgtgtcaaaaagccagaacgaggacgccaagaaggcctttgaggaaaaccagcaaaacctgagatccatcatcgccaagaagctcacaggagacaaggcttatgctaacctgtttggtaagaatctgatcgagagctataaggataaaaaagacaaaaaaaaaattatcgattctgatctgattcagttcatcaataccgccgattccacccagctggattctatgacccaggtggaggccaaagagctggtgaaggaattctggggctttgtgacctatttctacggcttctttgacaacagaaagaacatgtacactgccgagaagaagagcaccggcattgcctaccggctgattaacgagaatcttcctaagttcattgacaatatggaggccttcaagaaggtgattgcccgccccgagatacaggccaacatggaagagctgtactccgatttcagcgagtacctgaacgtggaatcaattcaggagatgttccagctggattactacgatatgctgctgactcagaagcagatcgatgtgtataacgccatcattggcggcaagacagacgacgagcacgacgtgaagatcaaggggattaacgagtacatcaacctctacaatcagcagcacaaggacacccggctgcctaagctgaaggccctgtttaaacagattctgtccgacaggaatgccatctcctggctgcccgaggagtttaacagcgatcaggaggtgctgaatgctatcaaggattgttacgagcggctgtctgagaacgtgctgggagataaagtgctgaagtcactgctgggcagcctggccgattactcactggagggcatcttcatcagaaacgacctccagctgaccgatatcagccagaagatgtttggcaactggggtgttatccagaacgctatcatgcagaatatcaaacatgtggcccctgcccggaaacacaaggagtccgaggaggagtacgagaaacggattgccggcatctttaagaaggcagactcctttagcatttcctatctgaacgattgcctgaatgaggccgaccccaataatgcatacttcgtggagaattacttcgctacttttggcgccgtgaacaccccaacaatgcagcgggagaacctgttcgctctggtgcagaacaagtacacagaggtggctgccctgctgcactctgattacccaaccgcaaagcacctggcccaggataaggctaacgtggccaagatcaaggccctgctggacgctatcaagagcctgcagcatttcgtgaaacctctgctgggaaagggtgatgagagtgacaaggacgagcgcttctacggcgagctggccagcctgtgggccgagctggagactgtgacacctctgtacaatatgatccgcaattacatgacaagaaagccctactctcagaagaagattaagctgaacttcgagaatccccagctgctggacgggtgggacgcaaacaaggagaaggattatgccaccatcatccttagacggaatggcctgtactacctggccatcatgggaaaggactcaaagaacctgctggggaaggctatgcccagcgacggagagtgctatgagaagatggtgtacaagcagttcgacatttccaagcagctgccaaaatgcaccacagagctgaaacacgtgaggaaggctctggtggaggacgccaagagaagctgcctgctgagcgacttcaataattggaacaagccactgaacgtgactaggaagctgtgggagctgaacaatttcgtgtgggacaagaagaaagaggattgggtgctgagaaagaaggataacgagaccagaccaaagaagtttcacaaaaagtacctggagctgaccagcgacaagaagggctacaaccaggcaaagaatgactggatcaagttcaccaaggagttcctgagcagctataaaaaggtggaggcatacgacatccactataagaaaaggtacaattctgtggacgagctgtacaagcagctgaacggggacctgtatgcaatctctttcacatacgtgagcgcttctttcattgaacagctggtgtctgaaggaaagatgtacctgttccaaatctacaacaaggacttcagtgagtactccaagggaactcccaatatgcatacactgtattggaaggctctctttgacgagaggaatctcgccgatgtggtgtacaaactgaacgggcaggcagaaatgttctaccgcaagaaatctatcgagaacacccacccaacccatccagccaatcatccaatcctgaataagaataaggataacaaaaagaaggagagtctgtttgattacgatctgattaaggacagaaggtacacagtggacaagtttatgtttcatgttcctatcaccatgaattttaagagcagcgggagcgagaacatcaaccaggacgtgaaggcatacctgagacatgccgacgatatgcacatcatcggtatcgatagaggcgagagacatctgttgtacctggtggtgatcgacctgcagggcaacatcaaagagcagtactcactgaatgagatcgtgaacgaatataacggcaacacataccacaccaactaccatgatctgctggacgtgcgggaagaggagcggctgaaggcccggcagagctggcagaccattgaaaacatcaaagagctgaaggagggctacctgagccaggtgatccataagatcacccagctgatggtgaaataccacgcaatcgtggtgctcgaagacctgaacatggggttcatgagaggccgccagaaggtggagaaacaggtgtaccagaagttcgagaagatgctgatcgataagctcaattacctggtggataagaaggctgacgcttccgtttccggcggactgctgaatgcctaccagctgacctctaagtttgattccttccagaaaatggggaagcagagcggatttctgttttacatccccgcttggaataccagcaagatcgaccctgtgaccggattcgtgaacctgctggatacccggtatcagaacgtggaaaaggccaaagtgttcttcagtaagtttgacgccatcaggtacaacaaggataaggattggttcgaatttaacctggattatgacaagtttggaaagaaggccgaggggaccagaacaaaatgggctctgtgcaccaggggcatgaggatcgacactttccgcaacaaagagaagaactctcagtgggataaccaggagattgatctgacagccgagatgaagagcctgctggagcactactacatcgacattcacggcaacctcaaggacgccatctccgcccagaccgataaggctttctttaccgggctgctgcatattctgaagctgacactgcagatgaggaactccattaccgggaccgagaccgactatctcgtgagccccgtggccgacgaaaatgggatcttctacgacagtaggagctgcggggacgagctgccagagaacgccgatgccaatggtgcttataatatcgccaggaagggcctgatgatgatcgagcagatcaaagacgccaaggacctgaacaacctgaaattcgatatctctaacaaggcgtggctgaacttcgcccagcagaagccctataagaacggatga

SEQ ID NO: 195 - DNA, 3960 bp, unidentified
  source 1..3960: mol_type = other DNA
atggagtttaacgatttcaagcgcttgtatcccctgagcaagaccctgaggttcgaggccaagcctatcggcgacaccctgaagaacatcatcaagaatggcctgctggaggaggacgagcacagggcccagagctatgtgaaagtgaagaagctgattgacgagtaccacaaagtgttcatcgaccgtgtgctgaatgacggatgcctgaccatcgaaaacaagggaaaaaaggattctctggaggagtattatgagtcctatatgtccaagtccaatgatgagaatgtgtctaagacattcaaggacatccaggaaaacctgcgctctgtgatcgccaacaagctgaccaaggacaaaggctacgccaacctgtttggaaataagctgatcgagtcctataaggataaggacgatacaaagaagatcattgatagcgacctgatccagtttatcaataccgccgagcctagcaatctggactcaatgtcccaggatgaggcaaaggagctggttaaagagttctggggctttaccacctatttcgaagggttccacaagaacagaaagaatatgtacacctcagaagaaaagagtaccggaatcgcctacaggctggtgaacgaaaacctgcctaagtttatcgataatatggaggccttcaagaaggccatcgccaagcccgagatccaggctaatatggaggagctctatagcaattttgctgagtacctgaacgtggaatccatccaggaaatgtttcagctggactactacaatatgctgctgacccagaagcagattgacgtgtacaacgccatcatcggcggcaagaccgacgaagaccacgacgtgaagatcaagggcatcaacgaatacatcaacctgtacaatcagcagcacaaagatgagaaactgcccaagctgaaagcactgtttaagcagatcctgagtgaccggaacgccatcagttggctgcctgaagaatttaactccgatcaggaagtgctgaacgcaattaaggattgttacgagcgcctgagcgagaacgtgctgggagacaaggtgctgaagagcctgctgtgcagcctctctgactacaacctggatggcatcttcgtgagaaatgacacccagctgaccgatataagccagaaaatgtttggcaattggtctgtcattcagaatgccatcatgcagaacattaagaaaaagaaactggcccggaaaagaaaagaatctgaggaggattatgagaagagaatccctgatatttttaagaaggccgactctttcagcatccagtacattaacgacagcctcaataaaatggacgataataacctgcacgcagttgatgaatattttgcgacactgggcgctgtgaacacaccaacaatgcagcacgaaaatctcttcgccctgatccagaacgcctacaccgacatctccgacctgctggacacaccatacccagagaataagaacctggcccaggataagacaaatgtggctaaggtgaaggccctgctcgacgccattaagagcctgcagcacttcgtgaagccccttctgggcaagggcgatgaaagcgacaaagatgagcgcttctacggcgaactggccagcctatggaccgagctggacaccgtgacactgctgtttaacatggtgcacaattacatgaccagaaaaccctactctcagaagaagatcaagctgaactacaaaaacacccagctgctggctggctgggatgcgaacaaagagaaagagcacgccgccatcatcctgcggagaaacggtatgtattacatcgccatcatggacaaagactccaagaatctgctggataaagctatgcccagtgacggcgagtgctacgaaaagatggtgtataagcagtttgatatttcaaagcagctgcctaagtgcacaactgagctgaaacgcgtccgcaaggccctgatagaggacgccaagcggtcttgcctgctgtccgacagcaaagattggaataagcctctcaatgtgaccaggaagctgtgggagctcaataactatgtgtgggacaagaagaaagccgactgggtgctcaggaagaaggagaatgagactagaccaaagaagttccacaaaaagtacctggagctcaccagcgacaagaaggggtataaccaggccaaaaacgactggatcaagttcaccaaggaattcctgtcaagctataagaaagtgaaagactacgatattcactacaagaagcgatacaactcagtggacgagctgtacaaacagctgaactctgatttttacaccatctccttcacctatgtgtctgtgagtttcattgacaagctggtcaatgaaggcaaaatgtacctgttccagatctacaacaaggatttcagcaattacagtaagggcacaccaaatatgcacaccctgtactggaaagccctgttcgatgagcggaacctggccgacgtggtgtataagctcaacggagaggcagagatgttttatcggaagaagagcatcaacaacacccacccaacccatcccgccaaccaccccatccagaacaaaaacaaggacaacaaaaaaaaggaaagcgtgtttgagtacgacctggtgaaagattaccggtacaccgaggacaagttcctgttccatgtgccaatcaccatgaatttcaagagcgtgggttctgagaacatcaatcagcaggtgaaggaatacctgcagcaggccgacgacactcacatcatcggcatcgacaggggcgagcgccacctgctgtacctcgtggtgatcgacatggaggggaatatcaaggagcagtttagtctgaacgaaattgtgaacgagtataacggcaatacatatcggactaactaccacgacctgctggacgtgtgcgcagataagcggctgaaggctagccagagctggcagacaatcgagaacatcaaggagcttaaggagggatacctcagccaggccattcacaagattactcagctgatggtgaagtaccatgccgtcgtggtgctggaagacctgaacaaaggcttcatgagagggcggcagaaggtggagaagcaggtgtatcagaagttcgagaagatgctgatcgataagctgaactacctggtggacaaaaaggccgacgctgcccagagcggcgggctgctgaatgcttatcagctgacctccaagttcgactcattccagaagctgggaaagcagagtggctttctgttctatatccctgcctggaacactagcaagattgatcctgtgacaggcttcgtgaacctgttcgacaccagatacaccaacgccgacaaggccctcaaattcttctcaaaatttgacgccatcagatacaacgaggagaaggactggttcgagttcgagttcgactacgacgagttcacccagaaagcccacgggaccagaaccaagtggactctgtgcacatatggcatgaggctgtgttcctttaaaaatcccgccaaacagtataattgggactccgaagtggtggccctgacagacgagttcaagaggatcctgggagaggcaggcatcgatattcacgagaacctgaaggacgcaatctgcaatctggagggcaaatcccagaagtacctggagcccctgatgcagttcatgaaactgctgctgcagctgcggaattcccgcaagaaccccgaggaggattacatcctgtcccccgtggccgatgagaacggcgtgttttatgactccagaagctgtggcgacaagctgcctgagaacgcagacgccaacggcgcatacaacattgcccggaagggcctgatgctgatcagacagattaaaaaggccaaggagctggataaggtgaaattcgatattagcaacaaggcctggctgaactttgcccagcagaagccatacaagaacgaatga

SEQ ID NO: 196 - DNA, 3912 bp, unidentified
  source 1..3912: mol_type = other DNA
atggaattcaacgacttcaaacgcctgtaccctctgtctaagacactgaggttcgaggctaagcccatcggtagcacactgaacaatatcatcaaatccggcctgctggaagaggacgagcaccgcgctcagtcctatgtgaaggtgaagaagctgatcgatgagtaccataaggtgttcatcgaccgggtgctggatgacggctgccttaccatcgagaacaaggacaagaaggattccctggaggaatattacgaatcctatatgtccaagtctaacgacgagaacgtgagcaagacatttaaggagattcaggaaaacctgcgctctgtgatcgctaagaagctcaccgacgataaagcctacgccaatctgttcggcaagaacctgattgaaagctataaagataaggacgataagaacaagattatcgattctgacttgatccagttcattaatacagccgagccttctcagctcgactctatgtctcaggacgaggccaaagagctggtgaaggagttctggggctttaccacatatttcgtgggattttttgacaacagaaagaacatgtacacctccgaggagaagtctaccggcattgcctacagactggtgaacgaaaacctgccaaagtttatcgataacatggaggccttcaagaaggccatcgccaaacctgagatccaggcaaacatgggcgaactgtatagcaacttcgccgaatatctgaatgtggaaagcatccaggagatgttccagctggactactacaacatgctcctgacacaaaagcagatcgacgtgtacaatgccatcattgggggcaaaacagatgaggagcatgacgttaagatcaagggcatcaatgaatacatcaacctgtacaatcagcagcacaaggacgagaagctgcccaaactgaaggccctgttcaagcagattctgagcgacagaaatgccattagctggctgccagaggaattcaatagtgataaagaggtcctgaacgctatcaaggactgttatgagaggctgagcgagaatgtgctgggggacaaggtgctgaaatccctgctctgcagcctgagcgactataacctcaacggcatttttgtgcgcaatgacctgcagctcacagacattagccagaagatgttcggcaattggagcgtgatccagaacgccattatgcagaacattaaaaacgtggccccagcacgcaagagaaaggagagtgaggaagattacgagaagcgcatcagcgatatcttcaagaaggccgacagtttctccatccagtacatcaacgattgcctgaatgagatggacgataataacctgcacgccgtggatggctactttgccaccctgggcgccgtgaacactccaactatgcagcgggagaatctgtttgccctgatccagaatgcttatacagacatttccaacctgctggacacaccctatcccgagaacaaaaatctggctcaggataaaaccaatgtggccaaggtgaaagccctgctggacgccattaagagcctccagcactttgtgaagcctctgctgggcatgggcgacgagtcagacaaggacgagaggttctacggcgagctggcctccctctggaccgaactggacactgtgacccccctgtataacatgatccgcaactacatgacccgcaaaccctatagcgaaaagaaaatcaagctcaactttgagaacccccagctgctgggcggctgggacgccaacaaggagaaagactacgccacaatcatcctgcgcaggaacgggatgtactatctggcaatcatgaacaaggacagcaaaaaactgctggggaagaccatgccttctgatggggagtgctatgagaaaatggtgtacaagtttttcaaggatgtgaccaccatgatccctaagtgtagcacccagctgaaggacgtgcaggcctactttaaggtgaacaccgatgatttcgtgctgaatagcaaagcctttaacaagcctcttactatcacaaaagaggtgttcgatctgaataacgtgctgtacggcaaattcaagaaattccagaaggggtatctgtccgccaccggcgacaccgccggctacacacatgccgtgaacgtctggattaatttttgcatggactttctgaattcctatgaaagcacatgtatgtacgacttcacaagcctgaagagcgagagctatctgtccctggacgccttctatcaggacgccaacctgctgctgtacaaactgtccttcaccaacgtgtctgtttcttttatcgacaaactggtggatgagggcaagatgtacctgtttcagatctacaacaaggatttcagcgactacagcaagggtacacctaacatgcatactctgtattggaaagcactgtttgatgaacggaacctggtcgacgtggtgtacaagctgaatggacaggccgagatgttctaccggaaaaagtccatcgactacacccatcccactcaccctgccaaccaccccatccagaacaagaacaaggataataaaaagaaggagtctgtgttcgaatacgatctggtgaaggacaggcggtacacggtggataagttcctgtttcacgtcccaatcacaatgaactttaagagcgtgggctctgagaatatcaaccagcaggtgagagagtatctccagcaggccgatgacacacacattatcggcatcgacaggggcgagcgccacctcctgtacctggtggtgatcgacatgcagggcaacatcaaagaacagttcaccctgaacgagatcgtgaacgagtacaacggaaacacatataggactaactatcatgaccttctggacacacgggaggaagaaagactgacagccagacagagctggcagaccatcgagaacatcaaggagctgaaggaggggtacctgtcccaggtgatccacaagatcacccagttgatggttaagtaccacgcagtggtggtgctggaggatctgaacaaggggttcatgagaggccgccagaaggtggagaaacaggtgtaccagaaattcgaaaagatgctgatcgacaaactgaactacctggtggacaagaaggccgacgcaactcagagcggagggttgctgaacgcataccagctgaagagcaagttcgacagcttccagaagctgggcaagcagtcagggtttctgttctacattccagcttggaacaccagcaagatcgaccccgtgacaggcttcgtgaacctgcttgacaccagataccagaacactgagaaggccaaggctttcttctccaagttcgatgccatccgctacaatgccgacaaagattggttcgaattcaatttggactatgataagttcggaacaaaggccgagggaacacgtacaacctggaccctgtgcacccagggcaaccgcatctgcacatttagaaatgcagagaagaactcccagtgggacaaccaggagattgacctgacaagagaaatgaagtctctgttcgagcactatcacatcaacatctgtggcaatctgaaggaggaaatttgctcccagaccgacaaagccttcttcaccgggctgctgcacatcctgaaactcaccctgcagatgaggaacagcattaccggcaccgagaccgactatctggtgtcccctgtggccgacgaaaatggcgtgttttatgacagcagaagctgcggggatatgctgcccaagaacgccgacgctaatggcgcttacaacattgctcgcaaaggcctgatgctgatcggccagatcaaggagactaaggacctggccaacttcaaatacgacatcagcaacaaagcctggctgaactttgcccagcagaaaccatataagaatgagtga

SEQ ID NO: 197 - DNA, 3825 bp, unidentified
  source 1..3825: mol_type = other DNA
atggacaagaagttcgaggatttcaagagactgtaccccctgagtaaaaccctgcggttcgaggctaaaccaattggctctaccctggataacatcattaaaagcggcctgctggacgaagatgagcacagggccgtgtcatacgtgaaggtgaagaagttgatcgacgagtaccacaaatcctttatagacagagtgctggatgagggctgcctgccatttgaaaacaacggggagaaagacagcctggaggagtactacgaatcatataaactgaaaagtaacgacgagaacgctaacaagacctttaaggaaatccagcagaacctgaggtctgtgatcgccaataagctgaccgacgataaagcatacgccaatctgtttggcaacaagctgatcgaatcttacaaggataaggaggataaaaagaagaccattgactctgacctgatccagttcatcaacacagccgaaccatctcagctggactctatgagccaggatgaggccaaagagctggtgaaagagttctggggattcacaacctacttcgtgggctttttcgacaataggaaaaatatgtacacatcagaggagaagagcaccgggatcgcctaccgcctggtgaatgagaacctgcccaagtttatcgacaatatggaagccttcaagaaagtgatcgcaaaaagcgaaatccaggccaacatcgaagagctgtactccaattttgccgagtacctgaacgttgaatctatccaggagatgtttcagctcgactactacaacatgctgctgactcagaagcagatcgacgtttacaacgccatcatcggcggcaaaacagacgagaagcacgacgtgaagatcaagggcataaacgagtacattaatctgtataaccagcagcacaaggatgagaagctgcctaaactgaaagccctgttcaagcagatcctgtcagatcggaatgctatttcatggctgcccgaggaattcaacgatgatcaggaggtgctgaacgctatcaaagactgttatgaacggctgagcgagaacgtgctcggcaacaaggtgctgaagagtctgctgtgttccctggccgattacaacctggacgatatttttattcggaacgacctgcagctgacagacatcagccagaaaatgtttggcaactggagcgtgatccaggacgccatcatccagaacatcaaaaacgtggcccccgcaagaaagaggaaagagagcgaagaggactacgagaagagaatttccggaatctttaagaaagccgacagcttctccattctgtacatcaacagctgtctgaatgagatggacgataactcactgcatgccgtggacggctactttgccactctcggagccgtgaacacacccaccatgcagcgcgagaatctgtttgctctgatccagaacgcttatacggacatttccgatcttctgaacaccaagtaccccgccaacaaaaatctggcccaggacaaaactaatgtggccaaggtgaaggccctgctggacgctatcaagtccctgcagcacttcgtgaagccactgctggggaagggcgacgaatccgataaagacgagagattctatggggagctggcctctttgtggaccgagctggacaccgtgacacctctgtacaacatgatcaggaattacatgacacggaaaccatatagcgagaagaaaattaagctgaacttcgagaaccctcagctgctgggcgggtgggacgccaataaggagaaggattatagcaccattattctgagacggaacggcatgtactacttggcaattatgaacaaggattcccggaggctgctcggaaaggccatgccaagcgatggggaatgttatgagaagatggtgtacaagctgcttcctggcgccaacaaaatgctgccaaaggtgttctttgctaagtccagaatcgacgacttcaagcccaatatccagatcgtggagaactataacaacggcactcacaaaaaacggaagaatttcaacatacaggattgccacgacctgatcgacttctttaagcagagcattaaaaagcacgaggactggtctaaattcagcttcaactttagcgatacttctacctacgaggacctgtccgggttttacagagaagtggaacagcaggggtacaagctctcctttatgaatgtcagcgtgtccttcatcgataaactcgtggacgagggcaagatgtacctgtttcagatttacaacaaggacttcagcgagtattccaagggcaccccaaacatgcacacactctactggaaggccctgttcgacgagcgcaacctggctgacgtggtttacaagctgaacggccaggccgaaatgttctatcggaagaaatccatagactacacccatccaacccaccccgcaaaccacccgatcctgaacaagaataaggacaacaagaagaaggagtccctgtttgagtacgatctgattaaagaccgcagatacaccgtggacaaattcctgttccacgtgccaatcaccatgaactttaagagcgtgggctcagaaaacatcaaccagcaggtcagagagtatctgcagcaggccgacgacacccacatcatcggcatcgataggggagaaagacacctgctgtacctggtggtgattgacatgcagggaaacatcaaggagcagtttacactgaatgagatcgtgaacgagtacaatgggaacacctatcgcaccaactatcacgacctgctggatattagagaggaggagcggctggccgctcgccagtcttggcagaccatcgagaacatcaaggagctgaaggaaggatacctgagccaggtgatccacaagatcacccagctgatggtgaagtaccacgctatcgtagtgctggaggacctgaacatgggcttcatgagggggagacagaaagtggagaagcaggtgtaccagaaatttgagaagatgctgatcgacaagctgaactatctggtggataagaaggccgatgctacacagcccggcggcatcctgaacgcctaccagctgactagcaagtttgactctttccagaagctggggaagcagtctggctttctgttttacatccccgcttggaatacctccaagattgacagcgtgactggctttgtgaacctgctggacaccaggtaccagaacaccgagaaggccaaagtgttcttctcaaaatttgacgccatccggtacaatgaggaaaaggattggttcgaattctacctggactacgacaagttcggttccaaggccgaagggaccagaaccaagtggaccctgtgcacccagggcaagagaatcaggacattcagaaacccagacaagaactctcagtgggacaaccaggaggtggacctgaccagagagatgaagagcctgtttgagcactaccacatcaacatctgcggcaatctgaaggaggagatctgcagccagaccgacaaagcctttttcacaggtctgctccatgtgctgaagctgaccctgcagatgcgcaatagcatcaccgggaccgagacagactacctggtgagccctgtcgccgatgaggagggcaacttttatgacagccgctactgcaacatcaccctgccaaagaatgccgacgccaacggtgcctacaatatcgctagaaagggcctgatgctcgtgaagcagatcaaagccgccacagacctggccaactttaagtacgatatctctaacaaggcctggctgaatttcgcccagcagaagccctataagaatgaatga

SEQ ID NO: 198 - DNA, 3756 bp, unidentified
  source 1..3756: mol_type = other DNA
atgaagaaatcctcactgcaggattttacaaatcagtacagcctgtcaaaaaccttgagattcgagctgattccccaaggagaaaccttggagcacattgagaaaaacggactgttaagccaggacgaacatcgagctgagtcttatattatcgtgaagaagatcatcgatgagtatcacaaggccttcataaccaaagccctggacggggtgaaactaaattcactggaggactacttcctatactaccagctgcctaaacgggacgaggagcaaaagaagaaattcgaggaaattcagaccaagttaaggaaacagatcgccgatcgattcgctaaacaggagagctttaaaaatctcttcgcaaaagagcttatcaaggatgacttgatcaactttgtcaagagtaacgacgacaagctcctggtcgcggaatttcaaaatttcactacctacttcacgggcttccacgaaaaccgaaaaaatatgtacagcgctgaagataaatcaactgccattgcttttaggttgatacaccagaacttgccaaagttcatagacaatatgagagcattcgacaagataaagatctctaaagtgaaagacagctttaagaccatactggcggacgatgaactgggcgcaattatccaggtgatagccgtagaagacgtgttcacccttaactactttaatgatacactcacacagttgggcatagataagtataatcagctcataggagggttcacaagcgaagacggtaagatcaagatcaaaggtctgaacgagtacatcaacctatacaaccaaactgcaaagaaagaggagagactgccgaaattgaagccgctctacaagcaaattctgtccgaccgctccactgcctccttcatccctgaggcgttttcgaatgataatgaagtgctggagtccatcgagaaactgtatcaggaaattaacgacttggttctcaataagcgggtaaagggtgaacacagccttaaagaattgctccagagtctaaacgaatacgacgtttccaaggtgtacttgagaaatgacctgtcactcactgatatctcacagaagatgtttggagactggggagtatttcagaaaggaatgcagacctggtacgccgtgaattataagggcaagaataaggccggcaccgaaaagtacgaggatgagcagaagaaatatttctcaaaccaggatagctacagtattggctttattaacgagtgcttactcctcttagataccgtgtatcagaagcggattgaggactattttaaattgctgggagagaggaatactgaagaggagaaatccgagaatctcttcgtcctaattgagaaaaactacaacggcattaaggatctgcttaacaatccatatccccacgacaaaaatcttgcccaagatcaggccaacgtggacaagattaagaactttttagacgtcgtgaaaacattgcagtggtttattaaacctcttctgggcaagggaaacgaggctgagaaagatgagcgattttacggtgagtttacttctctatggaccacactggaccaggtgacacccctctacaacaaagttcggaattacatgacccaaaaaccctactcaaccgagaagattaagctgaattttgagaattccacactccttgacgggtgggatgttaacaaggaggtggacaatactgcaatgatttttcgcaagaacggtctttattatctgggcatcatgaacaagaagcataacaagattttcaagaccgacatcgcaaatactgggggtgagtgctacgaaaagatggagtacaaactgttaccaggggccaacaaaatgctgcccaaagtttttttttcaaacagccgtatcgatgaattcaagccgggaacagaacttctcgagaattataagaacgagacgcataagaagggtgataattttaatctcaacgattgtcaccaccttattgatttcttcaagaccagtatcaacaagcacgaggactggaagcactttggcttccagttttctgatacaaaaacgtacaatgacttgtctggattctatagagaagtggaacaacagggctataagatcacatataaggcaatcagcgaaaactacattgctcaaatgatcgcagaggggaaactgtacttgttccagatctacaataaagatttcagtccttactccaaagggatgccaaatatgcataccctgtactggaaaatgcttttcgacgccgtcaatctgaagaacgttgtctataagctgaacgggcaggcagaagtgttctataggaaactgtctatcaaagccgaaaacattatcacacataaggcgaatgtgcctattcacaataaaaatgaggagaacgagaaaaagcaacaatcccgctttgattatgatataatcaaggacaagcggtacactatggacaaattccagttccatgtccctattactatgaatttcaaggctaaaggcttgaataacatcaacatcgaggtaaaccagtaccttaagaaagaatcggacattcatatcataggaatagaccggggggaaaggcatctgctatatttgacattaattgatggcaagggcaacatcaaacagcaatttagtctcaacgagatcattaatgagtatcagggaaagacctataagactaattaccacgatttactcgacaagaaagaaggcgaccgggatgatgctcgtagaaattggaagaccatcgagacaatcaaggagcttaaggagggatatctctcgcaagtcatccataaaatctctgaactcatggtagaacacaacgctatagtcgtgctggaagacctcaacatgggcttcatgagggggcgccaaaaagttgagaagcaggtgtaccagaagtttgaaaagatgctaatcgacaaactgaactacctggtcgataagaagaaaaaccccacagatctgggtggcactttaaatgcttatcagctgacgaacaagtttgagtctttccagaagatggggaaacagtctggcttcctcttttatgtccctgcttggaacaccagtaaaatggacccagtcaccgggttcgtaaacctgctggacacacgctacgaaaacattgaaaaggccaaaacgtttttctctaaattcgatagcatccattacaatccccttaagaagtatgtggagttcgagtgcgactacaatcgatttaccaccaaagccgaggggacacaaactaaatggacgctgtgtacgtataaggaaagaattgaaacctttcgtgacccaacccagaacagccagtggaagtccagggaaatagttcttacagatgaattcatcagcctgtttgagcagtacggtattgcttacaagaacaaggaagaactgaaagatgcaattgcgaggcagacagagaaggtgttctttgagcgcctgctgcacctgctgaaactgactctgcagatgcggaatagtatcacagggactgaaaccgattatctcataagcccagtggcaaatgccaaaggcgagttctatgactcccgcactgcttccgaaacgcttcccaagaatgccgacgccaatggagcatataacatcgccagaaaaggcctgtgggtggttgagcagattaaacaagccgatgatctgaaaaagctcaagctcgctatctctaataaggaatggctgggatttgtgcagaactatgggaaatga

SEQ ID NO: 199 - DNA, 3804 bp, unidentified
  source 1..3804: mol_type = other DNA
atgggctggagaaacggcttccagaagatcctgatcctgatcaacaacaagaagatgggcaatacaaatctgttcaagggatttacaaacttttaccccgtctccaaaaccctcagattcgaactgaagcccatcggcaaaaccctggagcacatcgaaaaaaacggcctcctgctgcaggatgagcaccgcgccgagtcctacgtgacagtgaagaagattattgacgaataccacaaagcctttattgccaaagccctggatggcctggtcctgaacgtgctggaggactatcacctgtattatcaactgcctaaacgggacgaggcccaaaataaaaaattcgaggagctgcagacagagatgagaaagcagatcgccgataggttcacaaagcaggacggcttcaagaacctgttcgccaaggagctgattaaggaggacctgaaggccttcgtccagacactcgaggacagacagctggtggaggagttcggcaactttaccacatacttcactgggtttcatgagaataggaaaaacatgtatagcgccgaggacaagagcaccgccatcgcctacaggctgattcaccagaacctgcccaaattcgtggacaacatgaaggctttcgataagatcagaaatagcgccgtgaaggagaaattcgccctgatcatctcagatgacgagttgggccccatcatccaggtgaaagacatcgaggaagtgttctgcctggattactttaacgagaccctgacccagaagggcattgacaagtacaatcagctgatcggaggatatatgccagaagacggcaaggagaagaaaaagggcctgaacgaatatatcaacctgttcaaccagaccgccaagaaggaggagcggatccctaagctgaagccactgtataaacagatcctgtctgaccggagcacagcctcctttattcctgaggagttcgagtgtgataacgaggtgctggagtcaatcgagaagctgtaccaggagattaacaaacacgcccttccccagctgaagggcctgatgaataacctgcacgattttgatctgcacaagatctatctgcgtaatgacctgtctctgacagacatcagccagaaaatgctgggcgactggggagccttccagaaggccatgaataagtggtttgacctgaattataagggcaaggcaaaacccggcaccgagaagtacgaggaggagcagaaaaagtactttaggaatcacgagtcatacagtatcgggttcatcaacgattgtctggccaagagcgacattgccgagcaccataagaaaatcgaagactactttaagcgggcaggagagcagattaatgagaccgagaatctctttaccctggtggagaaggggtactccaccgtgaacgacttactgaataacccatacccaaaggagaagaatttgagccaggaccagcagaatgtggataagattaaggcctttctggacggcatcaaggccctgcagtggtttattaagcctctgctgggcaaggggaatgaggccgagaaagacgagagattctacggggagttcgcaatgctgtggaccaccctggaccagatcacccctctgtacaataaggtgcgcaattacatgacccagaagccttactccaccgagaagatcaagctgaattttgagaattcctacttcctgaacggatgggcccaggactacgaatccaaggccggcctgatcttcatcaaagacggcaactactacctgggaattaataataagaagctgacaatcgaggagaaggaactgctgaagggcacggatgccaagcgcatcatcctggacttccagaagcccgacaacaagaacatccctagactgtttattaggagcaagggcgacaactttgcccctgccgtggaaaagtacaacctgcctattaaagatgtgatcgagatttacgactccggaaagttcaaaaccgactatcggaagaccaacgaggaggattataccaagagcctgcataagctgatcgattactttaaggaggggttcagcaagcatgagtcctacaagcattatccctttagctggaagagcacaaccgaatacaaggatatcgcagagttctacaacgatgtggaggtgagctgctatcaggtgtttgaggagggagtgaactgggggaagatcatggacttcgtggatcaggggaagctgtacctgtttcagatctataataaagacttttccccctatagcaagggaacccctaatatgcataccctgtactggaaaatgctgttcgacgccgagaatctgaaggacgtggtgtacaagctcaacggccaggccgaggtgttcttcaggaagtccagcatcaaggctgagaataaggtggtgcataaggccgagggcagcatccctaacaaaaacgagctgaatgccaagaagcagagcaccttcgactacgatatcattaaagacaggcgctacaccaccgacaagttccagttccatgtgcccatcaccatgaatttcaaggccagaggactgaataacattaataccgaggtgaatcagctgattaagaaggagaatgagatccacatcattgggatcgataggggcgagcgccacctgctgtacctgacactgatcgactcaaagggcagcattaagcagcagttttccctgaacgagatcatcaaccagtacaatggccagaattataagaccaattatcacaatctgctggacaaaaaggaaggcggcagagatgaggctcggcgcaactggaagaccatcgaaactatcaaggagctgaaagaaggatatctgtctcaggtgatccacaagatcgcagagctgatggtggagtacaatgccatcgtggtcctggaggacctgaacatgggatttatgagagggcgccagaaggtggagaagcaggtctatcagaaattcgaaaaaatgctgattgacaaactgaattacctggtggacaagaagaaaaaggccggggaattcggcgggacgctcaaggcctaccagctgacaaacaaattcgagtcctttcagaagatggggaagcagagcggcctgctgtattacgtgccagcctggaacacctccaagatggacccagttaccgggttcgttaatctgctggacacacgctatgaaaatatggagaaggccaagcagttttttggaaagtttgaagccatctcctacaagcagacaaagggctatttcgagttcgagtttgactacatgaagtataccaataaggccgagggaactaagaccaggtggaccctgtgtaccaacaacgagagaatcgagacttacaggaatccagaaaaaaatagccagtgggacagcagggaggtgggactgaccaaggagtttgtgtccctcttcgagcagttcggcatcaattttaaagataacgccgggctgaaggaggccatttgcaggcagactgagaaagcattttacgagaggctgctgcacctgctgaagctgactctgcaaatgagaaactctattaccggaaccgagatcgactacctgatcagccccgtggccaacgacaaaggtgaattctacgatagcagaaccgccgccgagattctgccacagaatgccgatgccaacggggcctataatatcgccagaaaaggcctgtgggttatcgaccagattaagcaggccgacgatctgaagaagctgaagctggccattagcaataaagagtggctcggcttcgtgcagaaggacgtgtga

SEQ ID NO: 200 - DNA, 3762 bp, unidentified
  source 1..3762: mol_type = other DNA
atgaagaacctgaccgagttcaccggcctctaccctgtgagcaagaccctgcgatttgagctgaagccccaaggccggaccctggagtacatcgaaaagaacggactgctggaacaagacgaacacagagccagcagctatatcctggtgaagaagatcatcgacgactaccacaaagcctttatcgctaacgccctccgcgattttaagctgtacagcctggaggattattacctgtattacaatatccagaagagagacgacgaacagaaaaagaaatttgaggatatccagtctaaactgcggaagcagatcgccgacagatttaccaaagaggagtcttttaagaacctgttcgccaaggaattgattaaggagaacctgatcgagttcgtgcagaccgtggaggaccgcgagctgatcaaggagtttgagagcttcactacctatttcaccggcttccacgagaatagaaagaacatgtactccgccgaggagaagagcaccgccatcgcctatcgcctgatccaccagaacctgcccaagttcatcgacaacatgagggtgttcgagaagatcgccaattcccctgtgaaggacaagttccagaccatcctgtccgacaaccaactgggcccagtcatccaggtgatggccgtggaggacatgttccgcctggattactttaacgagacactgactcagatcggcatcgacaaatacaattcactgtgcggcggcttttcaccaaatgagggcaaggaaaagatccaggggctgaatgagtatattaacctgtataaccagacagctaagaaggaagagagaatccccaagctgaagccactgtttaagcagattctgtctgatagatctaccgccagcttcatccctgacgagttcgagaacgactccgaggtgctggagagcatcgagctgttttatcaggaggtgaacgaacaggtgattaataagaacgtggaaggagagcactcactgaaggagctgctgaagagcctgcccgagtacgagctgaccaaaatttatctccgcaacgatctgtcaatcacagacattagtcagaagatctttggagactggggcgtgttccagaaggccatgaatacctggtttgagctgaattataacggcaaggccaagttcggaaccgagaagtacgaagaggagcagcggaagtattttgccaatctggatagcttctccataggcttcattaatgagtgcctgctgcagctggatacaccctaccacaagaacatcgccgactattttgccctcagagggaagaccgataccgaaacccaggacctgttcgccgtgctggaggacaagtacaacgccgtgaccgacctgctgaataacccctacccccaggaccaggatttagcccaggaccaaaagcaggtggataagctgaaagagctgctggatgccgtgaaggctatccagtggttcattaaaccccttctgggaaagggcaacgaggccgacaaagatgagagattctacggagagttcaccagcctgtggatcacactggatcagattacacctttgtacaacaaggtgagaaactacatgaccagaaaaccctacagcaccgataagattaagctgaattttgagaactcctattttctgaatggctgggctcaggactacgagtccaaggccgggctgatcttcaccaaagacggcaactattatctcggcatcaatgacaagaagctgagcaacgaggataagacactgctgaagagcaactctgagctgaacctggcaaagaggatcgtgctggatttccagaaacctgataataagaacatcccccggctgttcatccggagtaagggaaacaactttgcccctgccgtggagaagtacaacctgcccattcatgaggtcattgagatttacgataacggcaagtttaaaacagagtaccgcaagattaatgaaacagactacctgaagtctctgcacctgctgatcgactactttaagattggcttctctaagcacgagagctacaagcattaccccttctcctggaagaacaccaccgagtacaaggacatcgccgagttttaccacgacgtggaggtgagttgctaccaggtgttcgaggagaacgtgaattgggacaccctgatgaatttcgtggatgaggggaagctgtatctgttccagctgtacaacaaggacttctctcccaacagcaagggaaccccaaacctgcacacactgtattggaagatgctgttcgatgctgacaacctgaaagacgtcgtgtacaagctgaacgggcaggccgaagtgttttttagaaagtcctccatcaagcccgagaatatcgtgctgcataaggccaacgaggccgtcaacaacaagaacgagcagaacacaaagaagcagtctagatttgagtatgatatcatcaaggataagagatacaccgtggacaagttccagttccacgtccctatcaccatgaactttaaggccagagggctcaacaacattaacaccgaggtgaaccagtggctgcagaagagcgataacgtgcacatcatcggcattgacaggggtgagaggcacctgctgtacctgaccctgatcgacagcaaggggaacattaaacagcagttcagcctgaacgagatcgtgaatgagtatgagggcaagacctacaagaccgactaccacaaactgctggacaacagggaagggaaccgcgacgaggcccggaagaactggaaaaccatcgaaaccatcaaggaactgaaggagggctacctgagccaggtgatccacaagatttctgagctgatggtggagtacaacgccattgtggtgctggaagatctgaacatgggcttcatgaggggacggcagaaagtggagaagcaggtgtaccagaagttcgagaagatgctgatcgacaagctgaactacctggtggacaagaagcagaacccagctgagatggggggaaccctgcatgcctatcagtttaccaacaagtttgaatcctttcagaagatgggcaagcagtctgggatgctgttctacgttcccgcttggaatacttccaagatggaccccgtgaccggcttcgtgaatctgttcgacaccaggtacgaaaacatggaaaaggccagatccttcatcggcaagtttgacacaattcgctacaatcccaagaaggagtactttgaatttgacttcgactataacaaattcaccgccaaagccgagggtaccagaactagatggaccctgtgtacaaacgataccaggatcgaaaccttcaggaaccccgccaaaaattcccagtgggataaccgggagatcattctgtctgacgaattcatcaacctgtttaaactctacaacatcgactaccagaattccgacctgaaggtccagatctgtaagcagaccgaaaaagccttttttgagaggctgctgcacctgctgaagctgaccctgcagatgaggaatagtatgactggcacagaggtggactaccttatctcacccgtgaccaattccaggggcgagttctacgacagtaggactgcaagcgacatcctgcccaagaatgccgatgccaatggcgcctacaatattgcccgcaaggggatgtgggtcatcgaacagatcaggaaggccacagacttccggaagctgaagctggctatcagcaacaaagagtggctgagttttgtgcagcactga

SEQ ID NO: 201 - DNA, 3777 bp, unidentified
  source 1..3777: mol_type = other DNA
atgaagaggtttaccaatttgtatcagctgtcaaagaccctcagattcgagctcaagccaataggcaagactctggagaatatcgaaaagcacggactcctcgagcaggatacacatagggccgagtcctacgtgaaggtaaaagacattattgacgagtatcacaaggcctttatcgaagagtatctcaacactttcgcggattcctcagagacttacgcagagcaaaacaagaacttcgtcaaactgctccaagaactgtacaccaattacatgtgtaagacgaaggatgaaactcagcagaagctactgactgagagtcaggcaaagctacgtaagatcatagccaaaagttttaacaacgacaaatacaaacggctgttcggtaaggaattaatcaaggaagagttgatcgactttctcaaggatgacgtcgaggacattacactggtgcaggagttcaaggattttactacatatttcaccggctttcacgaaaatcgcaagaacatgtattctgatgaagacaaatctaccgccatagcctaccgactgatacacgagaatctgcctaggtttatagataacatcctggtgttcgaaaagattgcccaaagcgatgtggcccagaaatttacagagctgtataagaacttccagtcatacctcaatgttaaagagatctccgagatgttcaaattaggatactataacatggtgctgacacagacacagatcgacgtgtacaatgctataattggaggcaagaccatcgaggataatgacattaaaatcaaagggctcaatgaatacatcaacctgtacaaccagcaacaggaggataagcataacaggttacccaagctcaaaccgctctataaacagattttatctgaccgcaacgccattagctggcttcctgagcagttcgatgctaatgagaaaggcggcaaagttctggaggctattcagaaggcttacaatgagctggagcaacagattctgaacaattcaaatgaggcggagcattcactgcctgaactgctgaaacttctgagtaactacgacctaaacaagatctacatacccaacgacgcccaattgaccgatattagccaaaaggtgtacggacactggaacataatttcgaaggcactgatcgaagatctgaagctgaccacaccacggaaatctcgcaaggagacagatgaaaagtacgaagagagactcaacaaaatcctgaagagtcaatcatctttcagcatccgcaagataactgactccgtgcacaacacataccccgagatcaaatctagcattataacgtacttcgagaatatcggcaatatcgacaacgaagaggaaaacattattagcaagatcactaacagctataacatcgccaaagacttactgaacaccccctacctcgggaataacctcagtcaagacacggtaaatgtcgagaagattaaaaacctcctggacgcgattaaggacttgcagcattttattaagcccctgctaggaaaaggcgatgagtctgagaaagatgaaaagttttatggggagttcactttattgtgggacgaactgaacaatattacccctctgtataacatggtgaggaattatatgactagaaagccatactccactgaaaagatcaaactgaacttcgaaaacagcacacttctggacggatgggatttgaataaagagacagacaatacgtccgtcattctgcggaaagatggaatgtactatctggctataatgaacaagaagcacaatagggtgtttaatatcgattcgatacccaccgaaggggactgctttgaaaagatggaatataagttgttgcctggcgctaataagatgttgccaaaggtatttttctctaagtcacgcatcgacgagtttgcgccatctaagcagttgatagaaaaataccagtctggtactcataagaagggtgataacttttctctgatcgactgccataatctcatcaacttcttcaaagactccatcaataaacatgaggactggaaaaagttcaacttcaatttcagtgacacgaacacttatgaggacctgtctaatttctatagggaagtggaaaaacagggctataaaatcagcttccggaatgtatcttcagagtacataaactcactggttgaagacgggaaaatctaccttttccagatctacaacaaggatttttccagctatagcaagggaacacctaatatgcacacactgtactggaagatgctgtttgacgaaactaatatgagtgacgtctgctataaactgaacgggcaggcagaaatctttttccggaaatcctcgattaaggcagaacatccgacccaccccgctaatcagccgatcgagaacaaaaataccctcagcaataagaaacaatcagtgttcacctatgacctgattaaggacaaacggtatactatcgacaaattccattttcacgtccccatcacaatgaactttaaaggcatcggcattaacaacattaacaacatcgtgaatcagtttatccaggaacaagaagatcttcacataattggaattgacagaggagaaaggcacttgctatatctaaccgtcatcgacttacaggggaatatcaaggagcagtacagtcttaatgagatcatcaacaactataacggcaatacctataagaccaactaccacgatcttctcgaaaaaagagaaaaagaacgaatggatgctcgtcagagttggaagagtattgagagcatcaaggagctgaaggaaggttacctcagccaggttattcataagatcactaagctcatgatcaaatacaacgctatcgtggtgcttgaggacttaaatattggcttcatgcgggggcgacaaaaagttgaggcttccgtttatcagaagttcgagaaaatgctcattgataagctgaactatctggtggataaaaaaaagcagcctgaggaacttgggggcacattgaatgctttacagcttaccaacaaattcgaatcctttcaaaagctgggcaagcagtctggatttctattttatacccaggcctggaatacctctaaaatagatcctgtcacggggtttgttaacctgttcgacacacgctacgaaacacgcgaaaaagcaaaggagttctttaagaagtttgattccatctgttacaacagcgagaaagattggtttgagttctcctttgactataacaatttcacgactaaggctgagggtactagaaccaactggacattatgtacgtacggtaaacgaattgagacatttagagacgagaaacagaatagtcagtgggcctcaaatgagattaaccttaccgataagttcaaggagtttttcgcgaagtacaacattgatatcaacgcaaacctcaaggaaagcattacagcccaagaatccgcagattttttcaaagggattctcgcactcttgaaactaaccctgcaaatgcgtaattcaatgaccggtaccgatgtagattatcttcagtcgccagtggccgacaacaatggcgtgttcttcaattcccaggagtgcgacaatagcctgccacagaatgccgacgcaaatggggcctacaatattgccagaaaaggactttggattgtcaacaaaatcaagatcagcaatgatctgtccaacttgaatttcgccatatccaataaagagtggcttcagtttgcacaggagaagccctaccttttgaatgattga

SEQ ID NO: 202 - DNA, 3753 bp, unidentified
  source 1..3753: mol_type = other DNA
atggcaagtctgaaaaaattcacaagattgtaccccctgtccaagaccctgagattcgagctgattccactgggcctgaccgccgaccatatcggcaagagtggcatcctgagccaggacgaacacagggccgaatcttataagaaggtgaagaaaattatcgatgagtaccacaaggccttcatcgagaaggtgctgaacaacatccacctgcagtatgacaacatcgaacagaacaatagcctggaggagtatttcctgtactacatgatcaaaaacaaagacgagaagaaggagaagatctttgaggagatccagaagaagctgcggaagcagatcgccgatagatttatcgacgatccatctttcaagaatattgataagaaagaactgattcgctccgacctgaaggatttcgtgtgtagccaggaggatctgcagctggtggacgagttcaaggatttcaccacctatttcacaggcttccatgaaaatagaaagaacatgtactcctctgaggcccagagcaccgccatcgccttcagactgatccatgagaacctgcctaagtttatcgataacatccaggtgttcaacaaggtggccgcctcatccgtgtcagagtttttcactgagctgtacgccaacttcgaagagtgcctcacagtgaccgagatcgccgagatgttcaagctggagtactttaacagcgtgctgacacagaagcagatcgacgtgtacaatttcattctgggtggaaagtccatcgaggggggctctaagattaaggggctgaacgagtacatcaacctgtacaaccagcagcagaaggacaagtccaagcggctgccaaagttcaagcctctgtttaaagagattctgagcgaccgaaatagcatttcttggctgccagaaaagtttaaaagcgacgaggaagtgctggagacaatcgagaaggcttatcaggaactcaatgagcacgtgttgaacagaaacgtgggcggggagcactctctgaaggagctgctggtgcggctggaggacttcaacctcgacaagatctacgtgagaaacgaccaacagctgaccgacatcagtcagaaaatcttcggccactgggggactatatccaaagccctgctggaagagctgaagaacgaggtgcccaagaaaagcaacaaggagacagacgaggcctacgaggaacggctgaacaagatcctcaaatcccagggaagtgtgtctatcgccctgattaacaactccatccagaagctgaatatcgaagagaaaaagaccgtgaacagttacttcagcctgaacagcaatatttgccccaaggacaatctgtatacaaggattgagaacgcctacctggaggtgaaagacctgctgaataccccttatactggcaaaaatctggcccaggacaaactgaacgtcgaaaaaatcaagaatctgctggacgccatcaagtcactgcagcatttcgtgaagcccctgctcggcgacggaaaggaacccgagaaagacgagaaattctatggcgagttcttgtctctgtgggaggaactggacaagatcactccactgtacaatatggtgaggaattacatgacacagaagccctactctaccgagaagatcaagatcaactttgaaaacagtaccctgatggatggatgggatgtgaacaaggagcgggacaacaccagcgtgattctgcgaaaagacggcctgtattacctggccatcatgaacaagaagaacaaccaggtatttgatgcccacaatactcccagtaatggcatctgctacgaaaaaatggagtacaaacttctgcccggagctaacaagatgctgcctaaagtgttcttctccaaatcccggatccatgagtttgccccctccaagaagctgatcgagaattacaagaacgagacccacaagaaaggcaccactttcaatctggacgactgtcacaagctgatcgactttttcaagaccagcatcaagaagcatgaggattggaacagatttgagtttaagttttctgatactaccacctacgaggatctgagcgggttttacaaagaagtggagcagcagggctacaaaatctctttccgcaatgtgagcgccgattacattgataatctcgtgaaggagggcaagatctacctgttccagatttacaacaaggacttctccccatattccaagggcaccccaaatctgcacaccctgtactggaaaatgattttcgacgagcggaatctggccaatgtggtgtacaagctgaacggccaggccgaggtgttttttcggaagagctccatctcatacgacaagcctacccaccccgccaaccaggagattgataacaagaacatcctgaataagaaaaagcagtccatattctcctacgatctgattaaggacaagagatatactgtggacaagttccagtttcatgtgcctatcaccatgaatttcaagtccaccgggcaggataatatcaatctgagcgtcaacgagtacatccggcagagcgatgacctgcacatcatcggcattgacagaggcgagcgccacctgctgtatctgaccgtgatcgacctggagggcagaattaaggagcagtattccctgaacgagattgtgaacatctataacggcaatgagtaccataccaattaccatgacctgctgtcaaaacgcgaggacgagcgggagaaggcccgccagtcatggcagaccatcgagaatattaaggacctgaaggagggctacctgagccaggtgattcataaaatttccgagctgatgattaaatataacgccatcgtggtgctggaggacctgaacatcgggtttatgaggggtcgccagaaggtggaagcctccgtgtaccagaagtttgagaagatgctgatcgacaaactgaactacctggccaacaagaagattgatcctgaggaggagggcggaattctgaacgcctaccagctgaccaacaagttcaccagctttcagaagatcggcaaacagtcaggcttccttttttacactcaggcctggaacacctctaagatcgaccccagcacaggcttcgtgaatctgtttgataccagatacgagacccgcgagaagagcaagatgttcttcagtaagtttgactcaatcaaatataacaaagataaggattggtttgaatttatcttcgactataccaactttaccaccaaggccgaaggcacacgcacccagtggacaatctgctcctacggcaagcggattgagacactgagggatgagaacaaaaactctaactgggtgagtaccgagatcgacctgacccaatcctttaagaacttctttaccaagtacggcatcgacatcaacgacaacctgaaagagttcattgtgcagcaggatacttccgagttcttcaagggcatcctgtacctgttcaagctgactctgcagatgagaaacagcgccatcggcaaggacatcgattatattatcagccccatcgccgacgagaaaggcatcttttataattccaatgagtgcgactccagcctgcctaagaacgccgatgccaatggggcctataacattgcccggaagggcctgtacattgtgcgaaagataaagcactctgatgaactcaaaaatctgaatcttgccataactaacaaggagtggcttcagttcgcccagagcaagccttacatcaataagtga

SEQ ID NO: 203 - DNA, 3864 bp, unidentified
  source 1..3864: mol_type = other DNA
atgaagaaactgaatgccttctctcggatctatcccctgtccaaaaccctgcggtttgaactgcgccctatcggcaagacactggagcacatcgagaaatcaggaatcctgagccaggaccaacaccgcgccgagtcttatgtggaggtgaagaagatcatcgatgaatatcacaaagccttcattgagaatgtgctgaaggacttccgctttagcgaaaacagaggcgagaagaactccctggaggagttcctggtgtactatatgtgtaagtccaaggacgaaacccagaagcggcagttcgccgatatccaggacaaacttagaaaacagattgctaagaggttctccgacgacgataggtttaaacggatcgataagaaggagctgatcaaggaagacctgctgagcttcgtggaggacgtggaaaagcggcagctgattgaggagttcaaggactttaccacttattttaccggatttcatgaaaatagaaagaacatgtacactgatgaggcccagagcaccgccatcgcctacaggctgatccacgagaatctgccaaaattcatcgacaatatcatggtgtttgataaggtggccgcctctcccatcgccaagtacttcgccgagctgtactccgatttcgaggagtacctgaacgtgtccgaactgggagagatgttccggctggattactacaacattgtgctgacacagactcagatcgacgtgtataacgctgtggtgggcggccggaccctcgatgacggcaccaagatccagggactgaatgaatacataaacctgtataatcagcagcagaaagataagtccgcccggctgcccaagctgaagcctctgtacaagcagatcctgtccgacagaaacgctattagttggctgcctgagcagttccagagcgatgagaaggtgctggaagccattctgaaggcttatcaggagctggacgagcaggtgctgaataggaagaaggagggcgagcactccctgaaggagctgctcctgagcctgtccaattacgacctgaccaagatttacatcagaaatgacacacagatgacagatatttcccagaaagcctttggccattgggacgtgatccctaaagccctgctggaacagcttaagaaggaggtgcagaagaagtctaaagagtccgaagaggcttatgaggagcgcctgaacaaaattatcaagtcccagggctccattcccatagccctgattaaccagggagtgcagaagcagaactccgaagaacagaacaccctgcagacttacttcgccagtctgggagccgtggagaccgagtccgtgaagaaggagaatctgtttacccagattgaaaatgcttacgccgaggtgaaagatctgttgaataccccttatagtggcaagaatctggcacaagataacgtggccgtggagaaaatcaaaaccctgctcgacgccatcaaagccctgcagcacttcgtgaagcctctgctgggcgacggaaccgagagcgagaaggatgagaagttttacggcgaattctccatgctttgggaagagctggacaagatcacccccctgtataatatggtgagaaactacatgacccggaagccttacagcacagagaaaatcaagctgaattttgagaactccactctgatgaacgggtgggacctgaacaaggagcaggataacaccaccgtgatcctgagaaaagacgggatctattacctggctatcatggataagaagcacaagaaagtgttcgacgagaaaaacatcctgggatccggggaatgtttcgaaaaaatggagtacaagtttttcaaagatctcaccaccatggtgcccaagtgcacaacccagctgaaggtggtgaaagaacacttcctgacccacagcgagccctacaccatctccaaggacgtgttttacagcaaattcgagatcactaaagaggagtacgagctgaacaatgtgctgtataatggcaaaaagaaattccagaaagattacctgagacagaccggcgatgagaagggttataaggatgccctgaccaagtggatccggttctgcctgagatttctggctcagtacaagagcaccatgatttatgacatttcctcttttcaggtggactgcaaaattaactcatatacatccatcgatgaattttacagcgagatcaacctgtatctgtacaacatcacattccggaacgtgtcggtggattatattaactctctggtggaggagggcaagatctacctgttccagatttacaacaaggacttcagcccctacagcaagggcactcccaacctgcacaccctgtattggaagatgctgttcgatgaaaagaatctggctgatgtggtgtacaaactgaatggccaggctgaagtgttctatagaaaatcatcaatcatctgtgagaggccaacccaccctgccaaccaggccatcaataataaaaacgtcctgaacaagaaaaagcactccacattcgtgtacgatctcgtcaaagataagcggtacactgtggacaagttccagttccacgtgcccatcacaatgaactttaagtccactggcggcgataacatcaatctcctggtgaacgagtatatccagcagagcgacgatctgcacatcatcggcatcgatagaggcgagcgccacctgctgtacctgaccgtgattgacctgcaggggcggattaaagagcagtattccctgaacgagatcgtgaacacttacaatggcaatgagtaccgcactaactatcacgacctgctgagcaagcgcgaagacgagcgcatgaaagcccggcagtcatggcagactattgagaacatcaaggagctgaaagaaggctatctcagccaggtgatccacaagatctctgagctgattgtgaagtacaatgccatcgtggtgctggaggacctgaacatgggcttcatgagaggcaggcagaaggtggaaagctctgtgtaccagaagttcgaaaagatgctgatcgacaagctgaactacctggtggataagaagaaaaaccctgaagaggatggcggagtgctcaacgcctatcagctgactaacaagtttgagtcattccagaaagtggggaaacagagcgggtttctgttctacactcaggcttggaatacatctaagatcgaccccgtgaccggcttcgtgaacctgttcgacactagatacgagaccagagagaaagcgaaggacttctttggcaagttcgacgccatccgctacaacaccgccaaagattggttcgagttcgccttcgactacagcaatttcactagtaaggccgaggggtctcggactaactggaccctgtgtacctacggcgaaaggatcgagaagtttagagatgagaaacagaactccaactgggcctccaggggcatcaatctgaccgacaagttcaaagagctgtttgccgagtataagatcgacattcaaaccgacctgaaggaggtgatcagccgccaggatagcgccgatttcttcaagcgcctcctgtatctgctcaagctgaccctgcagatgagaaactccgagaccggcaccgaggtcgactacatgcagagccctgtggccgacgcaaatggcaatttttataacagcgagacctgcgacgactccctgcctaagaacgccgatgccaacggcgcctataacatcgcccggaagggcctgtggattgtgcagcagattaaggccaccgacgacctgaagaacgtgaagctgagcatctccaataaggaatggctgaagttcgcccaggagaaaccctacctgaacgagtaa

SEQ ID NO: 204 - DNA, 3768 bp, unidentified
  source 1..3768: mol_type = other DNA
atgaagaagctgaacgccttctcgagaatctaccccctgagcaagaccctgcgctttgagctgagacccattggcaagacactggagcatatcgagaagtccggtatcttgtcacaggatcagcaccgggccgagtcctatgtggaggtgaagaagattatcgacgagtaccacaaggccttcatcgaaaacgtgctgaaggacttcagatttagcgagaatcggggcgagaagaattccctggaagaattcctggtgtactacatgtgcaagtctaaagatgagatgcagaagaggcagttcgccgacattcaggataaattgcgcaagcagatcacccagcgattcagcgacgacgaccggtttaagagaatcgacaagaaggagctgatcaaggaagacctgctgtcctttgtggaggatgtggagaagagacagctgattgaggagtttaaggacttcaccacctactttaccggcttccacgagaacagaaagaacatgtataccgacgaggcccagagcactgcaatcgcctatcggctgatccacgagaacctgcccaagttcattgacaacatcatggtgttcgacaaggtggccgccagccccattgccgagcattttgccaagctgtattccgacttcgaggagtatctgaacgtgagcgagctgggggagatgttcaggctggattattataatatcgttctgacacagacccagatcgacgtgtacaatgccattgtgggcgggaagaccctggaggacgggaagaaaattcagggactgaatgagtacatcaacctgtacaaccagcagcagaaggacaaatccgccagactgcctaagctcaagcctctgtataagcagatcctgtctgataggaatgctatctcctggctgcccgagcagtttcagtctgacgagaaggtgctggaggccatccagaaggcctaccaagatctggaggagcaggtctttaaccgcaaaaaggagggagagcactcactgaaagacctcctgctgagcttgtccgactatgatctgtctaaaatttacatcaggaatgacactcagatgaccgacatctcccagaaggccttcggacactgggacgtgatccacaaggccctgctggagcagctcaaggaagacgtgcagaagaagcccaagaaagagagcgatgaggcctacgaggagaggctgaacaagattataaagagtcagggcagcatccccattgccctgatcaatcagggggtgcagaagcagaacagcgaggagcagaacaccctgcagacctacttcgccagtctgggcgccgtggagactgaatccgtgaaaaaagagaatctgtttacacagatcgagaacgcctacgccgaggtgaaggacctgctgaatactccctactccggcaagaatctggcccaggacaacgtggccatcgagaagattaaaacactgctggacacaatcaaggccctgcagcacttcgtgaaacccctgctgggggacggcacagagtctgaaaaggatgagaaattttatggcgaatttagtatgctgtgggaggagctggacaagattacccctctgtataacatggtgcggaactatatgaccagaaagccctactccaccgagaaaatcaagctgaacttcgaaaacagcactctgatgaacgggtgggacctgaacaaggagcaggataacaccaccgtgatcctgaggaaagatgggatgtattaccttgctatcatgaacaagaagcacaacagagtgtttgacgtgaagaacatcagcaaaaacggcgagtgttttgaaaaaatggagtacaagctgctgcccggagccaacaagatgctgcccaaggtgttcttttcaaagagcaggatcgacgagttcgccccctccgaacagctgctggaaaattacaacaagggaacccacaaaaagggcaatctgtttaacctgtctgattgccatgccctgatcgatttttttaaggcctctatcaataagcacaaagactggagcaagttcggcttcaaattctctgacactaacacatacgaggacctgtctggattctaccgagaggtggagcagcagggatataatatctcctttcggaatgtcagcgtggactatattaatagcctggtggaagagggaaagatctatctgtttcagatttataacaaggacttctcaccatacagcaagggcaccccaaacctgcacacactttactggaagatgctgtttgacgaaaaaaatctggccgatgttgtgtacaagctgaatggccaggccgaagttttctttagaaaatcctctatcatttgcgacaagcctacacacccagcaaaccagcccatcgacaacaagaacgctctgaataacaagcagcagtctgtgttcgagtacgatctggtcaaagacaagaggtataccgtggacaagtttcagttccatgtgcccatcaccatgaattttaagagcaccggcggggataacatcaatctgctggtgaacgagtatatcagacagagcgacgatctgcacatcatcggaatcgacagaggtgagagacacctgctgtacctgacggtgattgatctgcagggccggattaaggacaaggagcagtacagcctgaataagatcgtgaacacctacaacggcgacgagtacccaacaaattatcacgatctgctgagcaagcgcgaggatgagagaatgaaggccaggcagagctggcagacaatcgagaatatcaaggaactgaaggaggggtatctgagccaggtgattcacaaaatcagtgaactgattgtgaaatataatgccatcgttgtgctggaagatctgaacatgggattcatgaggggtcggcagaaggtggagagctccgtgtaccagaagtttgagaagatgctgatcgacaagctgaactatctggtcgataagaaaaagaaccctgaggaggatgggggagtgctgaacgcttaccagctgacaaacaagttcgatagctttcagaaactgggcaagcagtctggcttcctgttttacactcaggcctggaacaccagcaagattgaccctgtgacagggtttgtgaacctgttcgatacaagatatgaaacaagagaaaaagccaaggacttctttggcaagtttgacgccattcggtacaacaccgctaaggactggttcgagttcgcgttcgactacagcaactttactagcaaagcagaaggctctagaacaaactggacactgtgcacctatggagaacggatcgagaagttccgggacgagaagcagaacagcaattgggccagccagggcattaacctgaccgataaattcaaggagctgtttgccaagtacaaaattgatattcaggccgatctgaaagaagctatcagtcagcaggactccgccgacttcttcaaaggcctgctgtacctgctgaagctgacactgcagatgagaaattctgagatcggcacagagattgactacatgcagtcacccgtggcagatgcaaatggcaacttctataactctgatacatgcgatgacagcctgcctaaaaacgctgacgcaaatggcgcctacaacatcgcccggaagggcctgtggatcgttcagcagattaaggccgccgatgatctgaaaaatgtgaaactgagcatctccaataaagaatggctgaagttcgcccaggaaaagccttatctgaatgagtga

SEQ ID NO: 205 - DNA, 3774 bp, unidentified
  source 1..3774: mol_type = other DNA
atgtttatcatgacttcacttaaacggttcacaagagtctaccccctgagtaagaccctgagatttgaactgaagcctgtggggaagaccctggaccacatcgtgtcttctggactgctggagcaggaccagcaccgcgcaggcagctatgtggaggtgaaaaagattatcgatgagtaccacaaagccttcattgagtccagcctggacgattttgagctgcagtattacaatgaggggaagaataacagtctggaagagttctacagctattacatgtgtcggtctaaggatgaaacacagaaaaagttgttcgaggagaatcaggacaagctcagaaagcagatcgccgatagactgagcaaggacgagagattcaagcgcatcgacaaaaaggagctgatcgaaaaggatctcatcgacttcgtcaagaaaccagaagagagacagctgctggaagagttcaagggatttaccacctattttaccggctttcacgagaatcgcaagaatatgtacagtgccgaggcccagtccactgccatcgcctatagactgattcacgagaacctgcccaagttcatcgacaatatcatggtgtttgacaaggtggccgcctcccctgtggccgactccttcgccgagctgtatgccaatttcgaagagtacctgaatgtgacagaaatcgccgaaatgtttaacctcgcctattataacgtggtgctgacccagtcccagatcgacgtgtacaacgccatcatcggcggcaagaccttcgagaacggcgtgaaaattaagggcctgaatgaatacatcaatctgtactcccagcagcagaaggacaaaagcgcccgcctgcctaaactgaagcccctgtacaaacagattcttagcgacagaaacgccatcagctggctgccagaatacttttcagaggacgaaaagctgctggaggctatccagaagtcttaccaggagctggatgagcaggtgttcaaccggaagagggagggcgagcacagcctgaaggagctgctgctgggccttgaggggttcgacctgtccaagatttatatccggaacgatttgcagctgacagacatttctcagaaagtgtacggtagctggtcagtgatccagaaagcactgctggaagaactgaagggcgaggtgcagaagaagagcaaaaaggagaccgacgaagcctacgaagatagactgaataagatcctgaagtctcagggatcaatctccatcgccctgattaacgattgtgtgcacaagctgaattccgaggagcagaacacaatccaggggtacttcgccaccctgggcgccgtggacaaccagatcctgcagaaagagaacctgtttgtgcagatcgagaacgcctacactgagattaaggacctgctgaacaccccataccagggcagaaacctggcccaggacaaggtgaatgtggagaagatcaagaacctgctcgattccatcaagagcctgcagcactttgtgaaaccactgctgggcgacgggagcgaagccgagaaggacgagaagttctatggggagtttgtcgccctgtgggacgagctggacaaaatcacccctctgtacaacatggtgagaaattacatgaccaggaagccctactccacagagaagatcaagctgaatttcgaaaattctaccctgatggatggctgggacctgaataaggagcaggccaacaccaccgtgatcctgagaaaggatgggctctattacctggccatcatgaacaagaagaacaacaaagtgttcgacgtgaagaacattagctctaagggcgagtgctatgagaagatggagtataaactgctgcccggcgctaacaagatgctgcccaaagtgttcttctccaagagcaggatccacgaattcgccccctctgagcagctgctggaaaactataacaacgagacccacaagaagggcgctaccttcaacctgtccgactgccacgccctgatcgatttctttaaagcctccatcaataagcacgaggattggtccaaattcggattcaatttttccgacacctcctcctacgaagatctgagcggattttatcgggaggtggagcagcaggggtacaagatctcctttaggaatgtgagcgtggactatgtggattcactcgtggaagagggcaagatttatctgttccagatctacaacaaggatttcagtctgtatagtaagggcacacccaacctgcataccctgtactggaaaatgctgttcgatgagaagaacctggccgacgtggtgtacaagctcaacggacaggctgaagtgttttttaggaaatccagtattaactacgagagacccacccaccccgccaaccagccaattgacaacaagaatccccagaatgagaaaaaacagagcgtgtttaactacgatctgatcaaggacaagagatacacagtcgacaagtttcagttccacgtgcccatcacaatgaattttaagtccaccggctccgagaacattaatcagagcgtgaatgagcacatccagaagagcgatgacctgcacatcatcggcatagaccgcggtgaacgccacctgctgtacatcaccgtgatcgacctcaagggaaggataaaggagcagtttagcctgaacgagattgtgaaccactacaacggcaagaaccactgcaccgactaccacgccctgctgtccaaaagggaggaggagagaatgaaggctcggcagtcctggcagaccatcgagtctatcaaggagctgaaagaaggctatctgagccaggtggtgcacaagattagcgagctgatggtgaagtataacgccatcgtggttctggaggatctgaacatggggttcatgcggggcaggcagaaagtggaagctagcgtgtaccagaaattcgaaaaaatgctgatcgataagctgaactacctggccgacaaaaagaaagggccagaggaggagggcggcattctgaacgcctaccagctcaccaataagttcgtgtccttccagaagatgggaaaacagtccggcttcctcttttacgttccagcttggaacaccagcaagattgaccccgtgactggattcgtcaacctgtttgatactcgctacgagacccgcgagaaggctaaggctttcttcgccaagttcgagtccatcaggtacaacgaggataaggattggtttgaatttgcattcgactactctaagtttacatccaaggccgatggcagctgcacaaaatggaccgtgtgtacctatggcaagcgaattgagacattcagagacgagaagcagaactctaactgggtgagtaaggaggtgtgtctgactgagaaattcaaggattttttcgccaagtacggcatcgagctgagatctaatctgaaggagtacattatctcccaggatagcgctgattttttcaaaggactgctgtccctgctgaagctgaccctgcagatgagaaactccgaaaccgggacagatgtggattatctgcagagccccgtcgccgacgccaacggggagttctacaacagcgagaactgcgacgaatctctgcccgagaacgccgacgcaaacggagcctataatatcgctcgaaaggggctgtgggttgtgaaacagataaaaggggccgacgacctgaagaatctgaagctcgccatttccaacaaggagtggctgcagtttgtgcaggccaaaccctatcttaacgactga

SEQ ID NO: 206 - DNA, 3789 bp, unidentified
  source 1..3789: mol_type = other DNA
atgaagactttccagcagttttcacgcgtgtacccactgtcaaagaccctgagattcgaactgaagccaatcggcagtacactggaacacattaacaagaacggcctgctcgaccaggaccagcaccgcgccaagagctacattcagatgaagaacattatcgacgagtaccacaaggagttcatcgaggacgtgctggacgacctggaactgcagtacgacaacgagggaaggaataatagcatctccgaattctacacctgctacatgatcaagtctaaggacgacaaccagaggaagttatacgagaagatccaggaggagcttcggaagcagattgccaacgcctttaacaagtccgacatttataagaggatcttctcagagaagctgattaaggaggatctgaagaactttatcacaaatcagaaagataacgataagagagagcaggatatccagatcatcgaggagtttaagaatttcaccacctatttcaccggattccatgaaaataggaaaaacatgtacaccagcgaggctcagagcacggccatcgcctataggctgatccacgagaacctgcccaaattcatcgataatattatggtgttcgataaggtggccgcctctcctatcgctgacagcttcagcgagctgtacaccaattttgaggagtgcctgaacgtgatgagcatcgaggagatgttcaagctgaattattttaatgtggtgctgacacagaagcagatcgacgtttataacgccatcattggcggcaagaccatcgataatactaacatcaaaatcaaggggctgaacgaatacatcaacctctacaaccagcagcagaaggataagagcgcccggctgccaaagctgaaacctctgtacaagcagatcctgagcgaccgtaacgccatcagctggctccctgaacagtttgagtctgatgacaaactcctggaggccattcagaaggcttatcaggagctggatgagcaggtgctgaacagaaagatcgagggggagcacagcctgagggaactgttagtcgggctggccgattacgacctgtccaagatctacatcagaaacgacctgcagttgactgacatttcccagaaagtcttcggccattggggcgtgattagcaaagccctgctggaggagctgaagaacgaggtgcctaagaagagcaaaaaggagtccgatgaggcctacgaagaccgtctgaacaaggtcatcaaatcacagggcagcatctccattgcgttcattaacgactgcatcaacaagcagctgcccgaaaaacagaagactatccagggctacttcgcagagctgggagccgtgaacaacgagactatccagaaggagaacctgttcgcccagattgaaaatgcctacacagaggtgaaggacctgctgaatactccatatacaggaaagaacctcgctcaggacaaggtgaatgtcgagaaaattaaaaacctgctggacgccatcaaggcactgcagcacttcattaagcccctgttgggcgacggaaccgagcctgagaaggacgagaaattttatggagagtttgctgccctgtgggaggagctggataaaatcacccccctgtataatatggtgagaaactacatgaccagaaagccttactcaaccgagaaaatcaagctgaacttcgaaaattccactctgatggatggctgggatctgaacaaggaacaggctaatactacagtgatcctgaggaaggacggcctctactacctagccattatgaacaagaagcacaacagagtgtttgatgtgaaggccatgccagacgatggggactgctacgaaaagatggagtacaagctgctgcccggcgctaacaaaatgctgcccaaggtgtttttcagcaagtccaggatccaggagttcgccccaagctctcagctgctggagaattaccacaacgacacccacaagaagggcgtgacattcaacatcaaggactgccacgccctgatcgacttcttcaaagcctccattaacaagcacgaggattggtgcaagttcggattcagattctctcccaccgagacctacgaggacctgtctggcttctacagggaggtggaacagcagggctacaagatcagcttcagaaatgtgtccgtggactatatccactccctggtggaggagggaaaaatcttcctgttccagatctacaacaaggacttcagcccatacagtaaggggacacccaatctgcacacactgtactggaagatgctgttcgacgagaagaatctggccgacgtggtgtacaagctgaacggccaggccgaggtgttctttagaaagagcagcattaattacgagcaacctacacacccagccaataaggcaatcgacaataagaacgaactgaacaagaagaagcagagcctgtttacatacgacctgatcaaggataagcggtacactattgataaattccagtttcacgtcccaatcaccatgaacttcaagtctaccggtaacgataacatcaatcagagcgtgaacgagtacatccagcagtcagacgacctgcatattatcgggatcgacaggggcgaaaggcacctgctgtacctgactgtgatcaacctgaagggcgaaattaaggagcagtacagtctgaacgagatcgtgaacacctacaagggcaatgagtaccggactgactatcatgacctgctgagcaagagagaggatgagagaatgaaagccaggcagagctggcagaccatcgagaacattaaagagctgaaggagggctacctgtctcaggtcgtgcacaagatcgctgagctgatgatcaagtacaatgcaattgtggtgctggaggacctgaatgccggcttcatgaggggcagacagaaggtggagtcctctgtgtaccagaaattcgagaagatgctgatcgataagctgaattacctggccgacaagaagaaacagcccgaggagcccggcgggatcctgaacgcctaccaactgactaacaaattcgtgtccttccagaagatgggtaagcagtgtgggttcctgttctacacccaggcttggaacacaagtaagattgaccctgtgactggcttcgtgaatctcttcgacacacggtacgagactagggagaaggccaagactttcttcggcaagttcgactccattaggtacaatgatgagaaggattggttcgagtttgcttttgattatactaacttcactagcaaggccgacggttctaggaccaactggaaactgtgtacatatggcaagaggatcgagaccttcagagatgagaagcagaactctaactggactagcaaggaggtggtgctgaccgacaaatttaaagagttcttcaaagagagtaatatcgacatccacagcaacctgaaggaggctatcatgcagcaggacagcgccgattttttcaagaagctgctgtatctgctgaagcttaccctgcagatgagaaactccgaaaccggtacaaacgtggattacatgcagagccccgtggccgacgaggagggcaacttctataactctgatacctgcgactccagcctgccaaagaatgccgacgcgaatggggcctacaacatcgccagaaagggtctgtggatcgtgcagcagatcaagacatccgacgatctgagaaatctgaagctggccattaccaacaaggaatggctgcagtttgcccagaggaagccctacctggacgagtga

SEQ ID NO: 207 - DNA, 3768 bp, unidentified
  source 1..3768: mol_type = other DNA
atgggcacactgaagcagttcaccagggtttaccctttgtccaagaccctgcggtttgaactgaaacccattggcagaaccctggaattcattaactcctccggcctgctggaacaggaccagcacagggcagactcctatatcaaggtcaaggggatcatcgacgagtaccacaaggccttcatcgagaccgtgctgaacgactttaagctgaattacaccgacgagggcaagaagaacagcttggaagaattttacacctgctatatgtgcaaggcaaaagatgaggcccagaaaaagctgtttgaggaaatacaggggaagctgcgaaagcagatcgccgactgcttttccaaagatgacaagttcaagcgcatcgacaagaaggagctgattaaggaggacctggtgaatttcgtgaccaaccaggaggacagactgctcatcgatgagttccgggatttcaccacctactttaccggcttccacgaaaatcggaagaacatgtacagtgctgaggcccagagcaccgccatcgcttacaggctgatccacgagaacctgccaaaattcattgacaatatgctggtgtttgacaaggtggccgcttcccccgtgagcgagcacttcgtaggcctgtatagcaatttcgaagagtacctgaatgtgatgaatatcgccgagatgttcagactggactacttcaatatcgtgctgactcagaagcagatcgatatttataattacatcatcggtggcagaacccttgacgatgggaccaagattaaaggcctgaacgagtatatcaatctgtacaaccagcagcagaaggacaagagcgtgaggctgcctaagctgaaaccactgtacaaacagatcttgagcgatagaaacgccatcagctggctgcccgagcagttcgaaagcgacgagaaggccctggaagcaatccagaaggcctaccaggaactggacgagcaggtgtttaacagaaataaagaaggcgagcactccctgaaggagctgctgcagaccctcgccgaatacgacctggacaaaatctatatcaggaacgatctgcagatgaccgatatctcacagaaagtgttcggccattggggcatcattagcaaagcgctgctggagcagctgaagaaggagctgccgaagaaatccaaaaaggagactgatgaagcctatgaggaaagactgaacaaggtgctgaagagccaggggtcaatttccatcgcccagatcaacaatagtgtgtgggttatgggcatggaggagcagaattccatccaggcctatttcgcccggctgggcgccgtgaatacagaaaccgtgcagcaggagaacatcttctctcacatcgagaatgcttacacagaggtgaaggatctgctgaataccccttaccccctgaataagaacctggcccaggacaaggtgaatgtggagaaaatcaaaaatctgctcgacgccattaagtctctgcagcactacgtgaagcccctgctgggcgatggcaccgagtccgagaaagatgagaagttctacggagagtttgtggccctgtgggaggatctggacaagatcacacccctgtacaacatggtgaggaattacatgaccaggaaaccctatagtacagagaagatcaaactgaacttcgaaaatagcacactgatggacggctgggacctgaacaaggagcaggccaacaccacagtgatcctgaggaaggacgggctgtattacctggctatcatgaataaaaaacataacagggtgttcgacgtgaaaaacatgcctgagagcggcgactgctatgagaaaatggagtacaaactgctgcctggcgccaataagatgctgcctaaagtgttcttttctaagagcaggattaatgagtttgctcctagcgagcagctgatggctaattaccgcaatgagactcacaagaagggcgccagcttcaacatccacgactgccacgccctgatcgacttttttaaaagctcaatcaataaacatgaagactggtccagatttgggttccactttagcgataccaacacctacgaggacctgtccggcttctaccgcgaggtggagcagcagggctataagatttccttcaggaatgtgagcgtggactacattcacagcctggtggaggaaggcaagatctacttgttccagatctacaataaggacttctccccctacagcaaggggacccccaatctgcatactctgtactggaacatgatgttcgacgagcggaacctggcagatgtggtgtacaagctcaacggccaggccgaggtgttcttcaggaaatccagcattacctgcgagaggcctactcaccccgccaatcaggccattgagaataagaacgcactgaacgagaagaagcagagcgtgtttacatacgacctgatcaaggatcggcgctataccgtggacaaatttcagttccacgtgcctatcaccatgaattttaagtcaaccggaaacgacaatatcaatcagtccgtgaatgaatacatccagaagtgtgacgacctgcatatcatcgggatcgacagaggcgagcgccacctgctgtacctgaccgtgattgacatgaagggccagattaaagagcagtacagcctgaacgagatcgtgaacacatacaagggcaatgagtacaggaccaattaccacgagctgctgagcaagagagaagacgagaggatgaaagcccggcagtcttggcagaccattgagaacatcaaggagcttaaggagggctacctgagccaagtgatccataagatctccgagctgatggttaaatacaacgccatcgtggtgctggaggatctgaacatgggtttcatgaggggcaggcagaaagtggaggccagcgtgtatcagaagttcgaaaaaatgctgatcgacaagttgaactacctcgccgacaaaaagaaaaatcccgaggaggaaggagggatcctgaacgcttatcagctgactaacaagttcacctctttccagaaaatgggtaaacagagtggcttcctgttctatactcaggcctggaacacctccaagattgaccctgttacagggttcgtgaacctgttcgacacccgatatgagacaagggagaaggccaaagtgttcttctgcaagttcgattctatccgctacaaccgcgataaggattggttcgagtttgcattcgactacaacaagttcaccactaaggctgaggggacccacacccagtggatcctctgcacctacggcaaaaggatggagaccttccgggatgaaaagcagaatagccagtggacttcccaggagtgcggcctgacagacaaattcaaagagttctttgccaagtacggcatcgatattcatactaacctgaaggaggctatcgctcagcaagactccgccgacttcttcaaagggctgctgtatctgctgaaactgaccctgcagatgagaaatagcaaaaccggaactgacatagattacatgcagagccctgtggccgacgcaaacggaaatttctacaatagcgagctgtgtgacaatagcctgcccaagaatgccgacgccaacggcgcctataacattgccaggaagggcctgtggatcgtgaggcagatcaaggcctcagatgatctgaggaacctgaagctgaccattagtaataaggagtggctgcagttcgcccagaataagccatacctgaatgactga

SEQ ID NO: 208 - DNA, 3882 bp, unidentified
  source 1..3882: mol_type = other DNA
atgagcacctatagcgatttcactgggctgtacactctgtccaaaacgctacgatttgagctgaagcctatcggaaaaaccaaggacaatatagaacggaatggcatattagaccgggatagccagagagccattggatataaggcgatcaagaaggtgatagatgagtaccataaagcctttatcgaattgatgctggatagcttcgaactgaagcttaaagacgaaggtagaatggacagtctgatggagttctattatctgtaccatctgcctaccattgatagcaaaaggaaggatgacctgaagaaagtgcaggaggccttgcgtaagcagatatccgagtgctttacgaaaagcgaacaatataagcggctgtttgggaaggaactgatcagagaggacctggcggacttcatcaagacacccaagtatgagggagtaattagatcccagcatgataacgaggaccttacagaggaggagattcgaaagattcaggaagaagtggagaagaccatagaccaattctatgacttcactacctatttcgtgggtttctatgacaaccgtaagaacatgtatgtggccgacgataaggcaacctcaattgcacatcggatgattaccaagaacctcccaaagtttatcgataatatggatgtctttgcgaagatctcttcctcagaggttgccacgcacttcgaaactctttacaaagagatggaggcttacttgaacgtaaactccatcgaggaaatgttccagttagattactttagcatggtccttacacaaaagcagattgacgtgtacaattcaatcatcggaggaatggtcctagaaaacgggacgaaaattcagggcttaaatgagtatgttaacctgtataaccagcagcagaaagataaaggcaaccgcttacccaaattgaaacccctctttaaacaaattctcagtgaaaggaacgctataagttggctgccagaggagtttgagtcagacaatgacatgcttgatggtattgagaggtgttatcaggacctgaagaaacaagtcttcaatggagagaacagcatgcaggtgctcctgaaaagcattggtgattatgatctggagcatatctacctgccgaacgatctccagctgaccgacatcgcccagaagtattatgggtcttggtcggtgatcaagaaagcaatggaggaggacgtgaaagccaataacccacagaaacggaatgacaccggcgaaaaatacgaagagaggatcactaagttactcaagtctaaagagtctatcagcattgaggaaatcaatcgcctgatgaaatggctgttgggcgacgattataaaccaatggagaattacttctccatgatgggcgctgaggatgatgagaatggtcagaaacctgatcttttcattagaattgagaacgcctacactgaggcaaaagcactcttgacttcagtttacccagaagataggaaattgagccaagataagaagaatgtggagcggattaaaaatctcctcgacgcaattaaagatctgcagcgtttcgtcaaacctctcctgggcggcggaacagaatcagaaaaagatccaaggttctacggagagttcgtgcctatgtgggaggcactggaccagatcacaccgctttacaacatggtcaggaatcgtatgacacagaaaccctacagtgaagaaaagattaaactgaacttcgacactcccacccttctgaaagggtggcccgatgcccaagcatcctccggtgccatcctgaaagataataaggggctatactacctggctattttggattccatgcataggacatgtctgaacgaactcaagtcctgccccactgaaaagagtgaaatggcgattatgaaatatctgcagggcggtgacatggaaaaaaatgtgcaaaatctgatgcgcatcaatggcgtgactcgcaaggtgaacggacggaaggaaaaggagggagcaatggttggccagaacattagactcgagaatgcaaagaacacctatcttcctacagagatcaatgatatccgccttaagcaatcataccttacttcgagtcagagctttaataagcaggacctggccctatacatcgagtattacatgccattggtaagggaatactacagcgactaccagttttcctttaggaatccctcggagtacaaatcttttgctgaatttaccgaccacatcaatcagcaagcttatcaggtgcagtttggcagcatctccgacaagcagttattccagatggtcgaggaggggaagatatatctgttccagatttacaacaaggacttttccccttattccaaggggacgcccaatatgcacacgctctactggaagatgctgttcgatgagcgaaatttggctgatgtggtatataagctcaatggcgaagctgaagtcttcttcagaaagcactctatagaagttggcagaccgacccatcccgcgaataagcctatcgagaacaaaaataagctgaacgagaagaagatttcagtctttgcctacgatttgttaaaagacaggcgttacactgtcgataagttccagttccatgtaccaataaccatgaactttaaggccgcagggctaaataacatcaatccactggtgaatgcttatctgaaggagtctaaagccacacacatcataggtatagacagaggtgaacggcaccttctttacctgagtctcatcgacttacaagggaacatcgtggagcaatacagtcttaacgaaatcgtcaatgagtacaacgggaatacatatcgcactaactatcacgacctcttggatgccaaggaaaagcaacgagacgaagcaagaaagtcttggcagaccatcgagaatataaaagaacttaaggagggctacatgtcccacgtgatccataagatcgcagaactcatggtgaagtacaacgccgttgtggttctggaagacctgaaaccggggtttatgcgcggcagacagaaagtcgagaagcaggtgtaccagaaatttgagaaaatgctgatagacaagctgaactatctcgtggacaaaaaactagaagctaccgaaatggggggggttctcaacgcttaccagctcacaaataagtttgaaagttttcagaagcctgggaagcaaagcgggtttttattttacatacctgcctggaacacatctaaaatggatcccactacgggcttcgttaatttgctcgatacccgctatgaaaatatggctaaggctaaggctttcttcggcaagttcaaatcaattcggtacaatgccaccaaagactggttcgagttcgcctttgactacaacaacttccacaaccgcgccgagggaacccgaacacaatgggctctgtgcacctatggtacccggatcgagactaagcgggatcccaaacagaacaacagctttgtctctgaagagtttgacctgacatctaagttcaagaagctgctagcccactacgcgattgaccttaacggcaatctactggagcagatttgtagccagaacgacactcagttttataaggacttactccacctactccacctgacactgcagatgcggaattctatcaccggcacagacgtggattatctggtgtcgccagtaatgaacgtttacggagagttctatgattcaaggacctgcggcaacaatctccctaaaaacgcggacgccaacggagcctacaacattgctcgaaaaggattgtggatcatcgaacagattaaacagacagaagatttgagtaagctcaagttggccatttctaacaaagagtggatgagatacgcacaaggactgcgctga

SEQ ID NO: 209 - DNA, 3792 bp, unidentified
  source 1..3792: mol_type = other DNA
atgaagaccctgaaaaacctgacagggctgtacagcctgtccaagactctgcggttcgagctgaaacccatcggcaagactaaagagaacatcgagaagaacggaatcctggaaagggacaatgaaagagctatcgcctataaagctgtcaagaaagtgatcgacgagtaccacaaggcttttattgagctgatgctggacgactttgagctgaacaaggacaccctgaacgaattctactatctgtatcacctgcctacttctgaggccaagcgcaagaccgatctgccaaaggtgcaggaggtgctgagaaagcagatcagtgaaaggttcacaaaaagcgagcagttcaagaggctgtttgggaaggagctgatcagggaagacctggtggaattcgtcaagacccctcagtacgagaatatcattaggaagatgccagggaacgagcagttgaccgacaaggaggttaagcagatccaggagcgggtgcaaaaggacatcgcccagtttgatgatttcaccacctatttctccggcttttatgataacaggaaaaacatgtacgtgcccgaggacattgccacaagcattgcccacagaatgatcggggagaatctgccgaagttcattgataacatggacgtgttcgccagaatagccgctagcgacgtcgccacacatttcgacgagctgaataaggccatggagctgtacctgaacgtgaacgagatcccagagatgttccagctggactatttccacatggtgctcactcagaagcagatcgacgtgtataatgccattatcggcgggaaggtgctggatgatggcacgaaggtgcaggggctgaatgaatacgtgaatctgtacaatcagcagcagaaggataagagcaagcggctgcccaagctgaagccactgtttaagcagattctgagcgaaagaaacgccatctcttggctgcccgacgagtttgactccgacaacgagatgctgcagagcatcggcaagtgctaccacgacctgaaagaacaggtgtttggctccctgaagactctgctgggatccatcaaggactatgacctggagcacatctacctgcccaacgatctgcagctgaccgatatcgctcagaagcacttcggcgactggtctgtgattaagaatgcagtcatcgagaacctgcagagcgtgaatcctaagaagaaaagagagaatggagaaaattacgatgaacggatcctgaagctgcagaaagccaacgattcctacagcatcggcttcatcaatgccctgctgaggagcaagaccgatgactttaacccactggagaattatttcgccggaatgggagccgaagacaatgaaaatggccagaaactgaatcatttcgctaggattgagaacgcttatacagaagtgaagaccctgctgaacgccgattatccagagggcaagtcactgagccaggacaaagccaatgtggagaagattaagaacctgctggacagtatcaaggatctgcagcactacgtgaagcccctgctgggctcaggcatggagtctgacaaggacaatagattttacggggagttcaccccactgtgggaagcactggatcagatcacaccactgtataacatggtgaggaacagaatgacccagaagccatactccgatgagaaaattaagctcaacttcgacaattccaccctgctggccgggtgggacctgaataaggaagcagacaacacttgcactctcctgaggaaggacgggaactattacctggccatcattaacaagaggtccaacaaagtgctgaagccagagaacctgatcagcgatggcgattgctacgaaaagatggagtacaagctgctgccaggggccaacaaaatgctgccaaaggtcttcttttccaaatctcggattgatgagttcaagcccagcgaaagtgtgctgaagaactaccagaaggagacacataagaagggggacaacttcaacctggatgactgccacgccctgatcgatttttttaaggagagcatcaataagcatgaggactggagcaagttcggctttcacttcagcgacaccaatagctacgaggacctgtccgggttttacagagaggtggaacagcagggatacaagatcagctttaggaacgtgagcgtgaactacatcaatcagctggtggacgaggggaagatctacctgttccagatctacaacaaagacttctctccttactccaagggcacccctaacatgcataccctgtactggaggatgctcttcgatgagaggaatctggccgatgtggtgtataagctgaacggagaggcagaagtgtttttccggaaacactcaattagagtggataaacccactcaccctgccaataagcccatcgccaataaaaacgcacagaatgagaagaaggagagtatcttcacctacgatctggtgaaggaccggagatacaccgtggacaagttccagtttcacgtccccatcaccatgaatttcaaggccgccgggctgaacaatatcaatcccctggtgaacgcctatctcaaagagtccaatagcacccacattatcggcatagaccgcggcgaaagacacctgctgtacctgtccctgatcgacatgaaaggcaacatcgtggaacagtacaccctgaatgagatcgtgaatgagtacaagggaaatacctaccggaccaactatcacgacctgctggatgcaaaggaaaaacagcgcgacgaagccagacgctcctggcagaccattgagaacattaaggagctgaaggagggctatatgtcccaggtgatccacaagatcgccgagctgatggtgaaacacaatgccattgtggtgctcgaggaccttaacatgggctttatgcgagggagacagaaagtggagaaacaggtgtaccagaagtttgagaagatgctgatcgataagctgaattacctcgtggataagaaactggacgccgaggagatggggggcgtgttgaacgcctaccagctgacaaataaattcgagggctttcagaagctgggcaaacagtccggctttctgttctacattcccgcctggaacacctctaaaatggacccgacaaccggatttgtgaacctgttcgacaccagatatgagaacatggagaagtcaaaggtgttcttcggcaagtttgacagcatcagatataatagcgccaagggttggtttgagttcgccttcgactatgggaattttacagctaaggccgaaggcacccgcaccaactggaccctgtgcacatacggcacccggatcgaaaccaagagaaatcccgagaaaaataacgagttcgactcagtcgagattgacctgactgagcagttcaaagccctgttcgccaagcatcagatcgacctgagcggtaacctgaaggagcagatctgcaatcagtccgatgccagctttcataaagagctgctgcacctgctgcacctgaccctgcaaatgcggaacagcgtcacaaacagcgaagtggacttcctgctgtcccccgtgatgaacgccagcggcgagttctatgactcaagaacctgcgggaagaacctgccagagaatgccgacgccaacggcgcttacaatatcgccagaaagggactgtggatcattgagcagatcaagaacaccaacgacaatgacctggccaagatcaagctggctatcagcaataaggagtggcttaggtacgcccagggactggactga

SEQ ID NO: 210 - DNA, 3846 bp, unidentified
  source 1..3846: mol_type = other DNA
ctgaaaaacaaatattacgtttgcatcttcattaagaagactatcaactccattatcaatctgaaggagactaacaaaatgaagaagttcagcgattttaccaacgtgtacccagtgtccaagaccctgagatttgagctcaagccaatcgggaagacccaggagaacctgggcaaaattatcgatgaagacaatcagagagccaaggattataaggtggtgaagaaagtgattgacgagtaccacaaggccgtgatcgagcagctgctgaacgggttcgagctggacaaagacaccctggagaagtttaaagatctgtaccatctgtccatcagcgagcctaagagaaaggatctgcctaaggtgcaggaagtgctgcgggaacagatttccaagcggtttatcaagagtgagcagtataagcggctgttcggaaaggagctgatccaggaggacctgccagagttcgtgtattcttcaaaatacggcgacgtcatcaggaagcaacacgagaaggaacacctgtcagacgacgatatcaaccgcgagaggaaaagaatctgcgatgagatcgcccagtttgatgactttacctcttactttggcggatttcacgagaaccggaagaacatgtacgttgcagacgataaagccactagcatcgctcacagactgatcaatgagaacctgccaaagttcgtcgataacatggacgtgtttgccaaaatcgccgcatcagacgtggcccagcactttgataagctgtataaggagatggagccttacctgaacgtgggcgcaatctctgaaatgttcgagatcgggtacttcagcaccgtcctgacccagaagcagatcgatgtttacaacgccatcatcggcggtaaggtggaggaggacggcaggaagatccagggtctgaacgagtacatcaatctgtataaccagcagcagaaggataaggcaaacaggctgcccaagctgaagcccctgttcaaacagatcctgagcgatcgcaatgccattagctggctgcccgaagaattcgagtcagacaacgacatgctccagaggatcgaggagtgctaccagaatctcaaggagcaggtgtttgactccctgaagaccctgctggccaacatcaaggagtacgacattgcccacatctacctccctaatgacctgcagctgaccgatatctctcagaagcattttggaagctggtctgtgatcaagaacgccgtgatcgaaaaggtgaaagccgagaatccccagaagaagaaagagtccggcgagaaatacgaggagaggatcgccaaggagctgaaacactacgatagcctgacaatcggattcctgaacgatctgctgaagaatcaggtgggcttcacccctattgagatgtatttcgctaatatgggcgccgaggacaacgaaaacgggcagcaggtgaaccacttcgtgcgtatcgagaatgcttataccgacatctgccagcttctgagcactgagtataaaggggattccctggcccaggacaaaaagaacgtggaaaagattaagaacctgctggatgcaatcaaaaacctgcagcacttcgtgaagcccttgctggggaagggcaacgaatccgagaaggataatcgcttctacggggaattcacaccactgtgggaaatgctggaccagatcacccccctctataatatggtgaggaacaggatgaccaaaaagccttactcagaggagaaaatcaagctgaacttcgagaactcacagctgctgaaaggctgggacctgaacaaagaggtggccaacacctgtaccatgctgagaaaggacggcaattactacctggtgatcatgaataaaaagcacaatactgtgctgcagcccggcaagctggtgagcgacggggactgctacgagaagatggaatacaagctgctgcctggggccaacaagatgctgcctaaggtgttctttagcaagagcagaattggcgagttcaatccctccgagaggatcattaataactacaacaacaacactcataagaagggggatacatttaacctggacgattgccacgccctcatcgacttcttcaagaccagcattaacaagcatgaagactggtccaaattcgactttaaatttagcgatactaacacatactctgatctgagcggattttaccgggaggtggagcagcagggctacaaaatcgccttcagaaacgtgagcgtgcagtacatcgatcagctggtggacgaggggaagatttatctcttccagatttacaacaaagatttctccccctacagcaagggcaccccaaacatgcatacactgtactggagggccctgttcgacgagaagaacctggccaatgtggtgtataagctgaatggggaagccgaggtgtttttcagaaagcattctctgccatacaagcctacacaccctgccaaccagcctatcgcaaataagaactctcagaacaaaaagaaggagagcacattcgcctacgacctgattaaggaccggcgatacactctggacaagttccagctgcacgtgcccatcactatgaactttaaggccgccggcatcaacaatatcaacctgatggtcaaggattatctgaaggaatctgacgccacccacatcatcggcatcgacagaggcgagcgccacctgctgtacctgtctgtgatcaacatgaagggggagatcgtggagcagtactcactgaacgagatcgtgaacgagtataacggcaatacctacagaactaattaccacgacctgctggacgccaaagagaaacagcgcgatgaggcacgcaggagctggcagaccatcgaaaacatcaaggaactcaaggagggctatatgtcccaggtggtgcacaaaatcgcccagctgatggtgaaatataaggctatcgtggtgctggagaatctgaacatgggcttcatgcgcggccggcagaaggtggagaaacaggtgtaccagaaatttgagaagatgctcatcgataagctcaactacctggtcgacaaacagtgcgccatcgacgaagaaggcgggatcctgcacgcctatcagttaaccaacaagtttgagagcttccagaaaataggcacccagtccggcttcctgttttacatcccagcctggaatacatccaagatggaccctacaacaggcttcgtgaacctgtttgacaccagatatgaaaacatggagaaagcccgcctgttcttcgccaagttcgattccatccggtataatacaaatcagaactacatcgagtttgccttcgactacgacaatttcacctccaaggccgagggcactaagacaaaatggactctgtgtacctacggcactcgcatcgagaccaaaaggaatccagacaagaacaacgagttcgacagcatcgaactgaatctgaccgagcagttcaaggccctgttcactacataccatatcgacatcaccggaaatctgaaggagcagatctgcaatcagaacgacgcaactttctacaaggggttgctgcacctgctgcacctcaccctgcagatgcgaaacagtgtgaccggaacagcaacagactacctgctgtctcctgtgatgaacaataagggggagttttttgacagccggaaatgcggcaagaacctgccagagaatgcagatgccaacggcgcctacaacatcgccagaaaagggctgtgggtgattgagcagattaaacaggccgaggacctgtccaacatcgacctggccatcaagaacaaggagtggatgcagttcgcccagaagaacaggtga

SEQ ID NO: 211 - DNA, 36 bp, unidentified
  source 1..36: mol_type = other DNA
ggctactaagcctttataatttctactattgtagat

SEQ ID NO: 212 - DNA, 35 bp, unidentified
  source 1..35: mol_type = other DNA
gctactaagcctttataatttctactattgtagat

SEQ ID NO: 213 - DNA, 36 bp, unidentified
  source 1..36: mol_type = other DNA
atctacaatagtagaaattaattgagtcaattagac

SEQ ID NO: 214 - DNA, 36 bp, unidentified; identical to SEQ ID NO: 213
  source 1..36: mol_type = other DNA

SEQ ID NO: 215 - DNA, 36 bp, unidentified
  source 1..36: mol_type = other DNA
atctacaatagtagaaattaaaatggctttatagcc

SEQ ID NO: 216 - DNA, 37 bp, unidentified
  source 1..37: mol_type = other DNA
atctacaatagtagaaattaaaatggctttatagcca

SEQ ID NO: 217 - DNA, 36 bp, unidentified
  source 1..36: mol_type = other DNA
atctacaatagtagaaattcaaatggctttattgcc

SEQ ID NO: 218 - DNA, 36 bp, unidentified; identical to SEQ ID NO: 217
  source 1..36: mol_type = other DNA

SEQ ID NO: 219 - DNA, 36 bp, unidentified
  source 1..36: mol_type = other DNA
gtctaaaggactcaaataatttctactattgtagat

SEQ ID NO: 220 - DNA, 36 bp, unidentified; identical to SEQ ID NO: 219
  source 1..36: mol_type = other DNA

SEQ ID NO: 221 - DNA, 36 bp, unidentified
  source 1..36: mol_type = other DNA
gtctaacagattggaataatttctactattgtagat

SEQ ID NO: 222 - DNA, 36 bp, unidentified; identical to SEQ ID NO: 221
  source 1..36: mol_type = other DNA

SEQ ID NO: 223 - DNA, 36 bp, unidentified
  source 1..36: mol_type = other DNA
atctacaatagtagaaatttatagtctcttttagac

SEQ ID NO: 224 - DNA, 36 bp, unidentified; identical to SEQ ID NO: 223
  source 1..36: mol_type = other DNA

SEQ ID NO: 225 - DNA, 36 bp, unidentified
  source 1..36: mol_type = other DNA
ggctataagccttgtataatttctactattgtagat

SEQ ID NO: 226 - DNA, 36 bp, unidentified; identical to SEQ ID NO: 225
  source 1..36: mol_type = other DNA

SEQ ID NO: 227 - DNA, 36 bp, unidentified
  source 1..36: mol_type = other DNA
ggctataagccttatataatttctactattgtagat

SEQ ID NO: 228 - skipped

SEQ ID NO: 229 - DNA, 36 bp, unidentified
  source 1..36: mol_type = other DNA
gtctatagaggctcaataatttctactattgtagat

SEQ ID NO: 230 - DNA, 36 bp, unidentified; identical to SEQ ID NO: 229
  source 1..36: mol_type = other DNA

SEQ ID NO: 231 - DNA, 36 bp, unidentified
  source 1..36: mol_type = other DNA
ggctataagtctgtataatttctacttagtgtagat

SEQ ID NO: 232 - DNA, 36 bp, unidentified; identical to SEQ ID NO: 231
  source 1..36: mol_type = other DNA

SEQ ID NO: 233 - DNA, 36 bp, unidentified
  source 1..36: mol_type = other DNA
gcctataaaggcacaataatttctactattgtagat

SEQ ID NO: 234 - DNA, 36 bp, unidentified; identical to SEQ ID NO: 233
  source 1..36: mol_type = other DNA

SEQ ID NO: 235 - DNA, 36 bp, unidentified
  source 1..36: mol_type = other DNA
atctacgatagtagaaattaacttggctttatagcc

SEQ ID NO: 236 - DNA, 36 bp, unidentified; identical to SEQ ID NO: 235
  source 1..36: mol_type = other DNA

SEQ ID NO: 237 - DNA, 36 bp, unidentified
  source 1..36: mol_type = other DNA
ggctataaagccaatttaatttctactattgtagat

SEQ ID NO: 238 - DNA, 36 bp, unidentified; identical to SEQ ID NO: 237
  source 1..36: mol_type = other DNA

SEQ ID NO: 239 - DNA, 37 bp, unidentified
  source 1..37: mol_type = other DNA
atctacaatagtagaaattttatttgtcatttagact

SEQ ID NO: 240 - DNA, 36 bp, unidentified
  source 1..36: mol_type = other DNA
atctacaatagtagaaattttatttgtcatttagac

SEQ ID NO: 241 - DNA, 36 bp, unidentified
  source 1..36: mol_type = other DNA
atctacaacagtagaaattattgaggccttatagcc

SEQ ID NO: 242 - DNA, 36 bp, unidentified; identical to SEQ ID NO: 241
  source 1..36: mol_type = other DNA

SEQ ID NO: 243 - DNA, 36 bp, unidentified
  source 1..36: mol_type = other DNA
gtctataagacgattctaatttctactattgtagat

SEQ ID NO: 244 - DNA, 36 bp, unidentified; identical to SEQ ID NO: 243
  source 1..36: mol_type = other DNA

SEQ ID NO: 245 - DNA, 36 bp, unidentified
  source 1..36: mol_type = other DNA
gtctataaggcctcaataatttctactattgtagat

SEQ ID NO: 246 - DNA, 36 bp, unidentified; identical to SEQ ID NO: 245
  source 1..36: mol_type = other DNA

SEQ ID NO: 247 - DNA, 36 bp, unidentified
  source 1..36: mol_type = other DNA
ggctaataagtcgatgtaatttctactattgtagat

SEQ ID NO: 248 - DNA, 36 bp, unidentified; identical to SEQ ID NO: 247
  source 1..36: mol_type = other DNA

SEQ ID NO: 249 - DNA, 36 bp, unidentified; identical to SEQ ID NO: 247
  source 1..36: mol_type = other DNA

SEQ ID NO: 250 - DNA, 36 bp, unidentified; identical to SEQ ID NO: 247
  source 1..36: mol_type = other DNA

SEQ ID NO: 251 - DNA, 36 bp, unidentified
  source 1..36: mol_type = other DNA
ggctaataagccagtggaatttctactattgtagat

SEQ ID NO: 252 - DNA, 36 bp, unidentified; identical to SEQ ID NO: 251
  source 1..36: mol_type = other DNA

SEQ ID NO: 253 - DNA, 36 bp, unidentified
  source 1..36: mol_type = other DNA
atctacaatagtagaaattaaattggcttgttagcc

SEQ ID NO: 254 - DNA, 36 bp, unidentified; identical to SEQ ID NO: 253
  source 1..36: mol_type = other DNA

SEQ ID NO: 255 - DNA, 36 bp, unidentified
  source 1..36: mol_type = other DNA
ggctataaagccataacaatttctactattgtagat

SEQ ID NO: 256 - DNA, 36 bp, unidentified; identical to SEQ ID NO: 255
  source 1..36: mol_type = other DNA

SEQ ID NO: 257 - DNA, 37 bp, unidentified
  source 1..37: mol_type = other DNA
ggctagtaagcttcaataatttctactattgtagatt

SEQ ID NO: 258 - DNA, 36 bp, unidentified
  source 1..36: mol_type = other DNA
ggctagtaagcttcaataatttctactattgtagat

SEQ ID NO: 259 - DNA, 36 bp, unidentified
  source 1..36: mol_type = other DNA
atctacgatagtagaaattatcaagtccttatagac

SEQ ID NO: 260 - DNA, 36 bp, unidentified; identical to SEQ ID NO: 259
  source 1..36: mol_type = other DNA

SEQ ID NO: 261 - DNA, 36 bp, unidentified; identical to SEQ ID NO: 259
  source 1..36: mol_type = other DNA

SEQ ID NO: 262 - DNA, 36 bp, unidentified; identical to SEQ ID NO: 259
  source 1..36: mol_type = other DNA

SEQ ID NO: 263 - DNA, 36 bp, unidentified
  source 1..36: mol_type = other DNA
atctacaatagtagaaattacttaggctttatagcc

SEQ ID NO: 264 - DNA, 36 bp, unidentified; identical to SEQ ID NO: 263
  source 1..36: mol_type = other DNA

SEQ ID NO: 265 - DNA, 36 bp, unidentified
  source 1..36: mol_type = other DNA
gtctaagacagcatttaaatttctactattgtagat

SEQ ID NO: 266 - DNA, 24 bp, unidentified
  source 1..24: mol_type = other DNA
atttaaatttctactattgtagat

SEQ ID NO: 267 - DNA, 36 bp, unidentified
  source 1..36: mol_type = other DNA
ggctataagccttattaaatttctactattgtagat

SEQ ID NO: 268 - DNA, 36 bp, unidentified; identical to SEQ ID NO: 267
  source 1..36: mol_type = other DNA

SEQ ID NO: 269 - DNA, 36 bp, unidentified
  source 1..36: mol_type = other DNA
atctacaatagtagaaattataaaagtcatttagac

SEQ ID NO: 270 - DNA, 36 bp, unidentified; identical to SEQ ID NO: 269
  source 1..36: mol_type = other DNA

SEQ ID NO: 271 - DNA, 36 bp, unidentified
  source 1..36: mol_type = other DNA
atctacaatagtagaaatttaattaggcgagtagcc

SEQ ID NO: 272 - DNA, 36 bp, unidentified; identical to SEQ ID NO: 271
  source 1..36: mol_type = other DNA

SEQ ID NO: 273 - DNA, 36 bp, unidentified
  source 1..36: mol_type = other DNA
gtctgaaagacacatataatttctactattgtagat

SEQ ID NO: 274 - DNA, 36 bp, unidentified; identical to SEQ ID NO: 273
  source 1..36: mol_type = other DNA

SEQ ID NO: 275 - DNA, 36 bp, unidentified
  source 1..36: mol_type = other DNA
atctacaatagtagaaattataaaattactatagcc

SEQ ID NO: 276 - DNA, 36 bp, unidentified
  source 1..36: mol_type = other DNA
atctacaatagtagaaattataagattactatagcc

SEQ ID NO: 277 - DNA, 36 bp, unidentified
  source 1..36: mol_type = other DNA
atctacgatagtagaaattataaaattactatagcc

SEQ ID NO: 278 - DNA, 36 bp, unidentified; identical to SEQ ID NO: 277
  source 1..36: mol_type = other DNA

SEQ ID NO: 279 - DNA, 36 bp, unidentified
  source 1..36: mol_type = other DNA
gtctaattgactttattaatttctactgttgtagat

SEQ ID NO: 280 - DNA, 36 bp, unidentified; identical to SEQ ID NO: 279
  source 1..36: mol_type = other DNA

SEQ ID NO: 281 - DNA, 36 bp, unidentified
  source 1..36: mol_type = other DNA
atctacaatagtagaaattataatagtcttatagac

SEQ ID NO: 282 - DNA, 36 bp, unidentified; identical to SEQ ID NO: 281
  source 1..36: mol_type = other DNA

SEQ ID NO: 283 - DNA, 36 bp, unidentified
  source 1..36: mol_type = other DNA
atctacaatagtagaaattatccaagtcctatagac

SEQ ID NO: 284 - DNA, 37 bp, unidentified
  source 1..37: mol_type = other DNA
atctacaatagtagaaattatccaagtcctatagact

SEQ ID NO: 285 - DNA, 36 bp, unidentified
  source 1..36: mol_type = other DNA
ctctatgaggcacatttaatttctactattgtagat

SEQ ID NO: 286 - DNA, 36 bp, unidentified; identical to SEQ ID NO: 285
  source 1..36: mol_type = other DNA

SEQ ID NO: 287 - DNA, 36 bp, unidentified
  source 1..36: mol_type = other DNA
gtctataagacttaagtaatttctacttttgtagat

SEQ ID NO: 288 - DNA, 36 bp, unidentified; identical to SEQ ID NO: 287
  source 1..36: mol_type = other DNA

SEQ ID NO: 289 - DNA, 36 bp, unidentified
  source 1..36: mol_type = other DNA
atctacaatagtagaaatttaatcagctttatagcc

SEQ ID NO: 290 - DNA, 47 bp, unidentified
  source 1..47: mol_type = other DNA
gttgttcgcgactgcaaatgtataaaactttgaaagcaattcacaac

SEQ ID NO: 291 - RNA, 36 nt, unidentified
  source 1..36: mol_type = other RNA
ggctactaagcctttataatttctactattgtagat

SEQ ID NO: 292 - RNA, 36 nt, unidentified
  source 1..36: mol_type = other RNA
gtctaattgactcaattaatttctactattgtagat

SEQ ID NO: 293 - RNA, 36 nt, unidentified
  source 1..36: mol_type = other RNA
ggctataaagccattttaatttctactattgtagat

SEQ ID NO: 294 - RNA, 36 nt, unidentified
  source 1..36: mol_type = other RNA
ggcaataaagccatttgaatttctactattgtagat

SEQ ID NO: 295 - RNA, 36 nt, unidentified
  source 1..36: mol_type = other RNA
gtctaaaggactcaaataatttctactattgtagat

SEQ ID NO: 296 - RNA, 36 nt, unidentified
  source 1..36: mol_type = other RNA
gtctaacagattggaataatttctactattgtagat

SEQ ID NO: 297 - RNA, 36 nt, unidentified
  source 1..36: mol_type = other RNA
gtctaaaagagactataaatttctactattgtagat

SEQ ID NO: 298 - RNA, 36 nt, unidentified
  source 1..36: mol_type = other RNA
ggctataagccttgtataatttctactattgtagat

SEQ ID NO: 299 - RNA, 36 nt, unidentified
  source 1..36: mol_type = other RNA
ggctataagccttatataatttctactattgtagat

SEQ ID NO: 300 - RNA, 36 nt, unidentified
  source 1..36: mol_type = other RNA
gtctatagaggctcaataatttctactattgtagat

SEQ ID NO: 301 - RNA, 36 nt, unidentified
  source 1..36: mol_type = other RNA
ggctataagtctgtataatttctacttagtgtagat

SEQ ID NO: 302 - RNA, 36 nt, unidentified
  source 1..36: mol_type = other RNA
gcctataaaggcacaataatttctactattgtagat

SEQ ID NO: 303 - RNA, 36 nt, unidentified
  source 1..36: mol_type = other RNA
ggctataaagccaagttaatttctactatcgtagat

SEQ ID NO: 304 - RNA, 36 nt, unidentified
  source 1..36: mol_type = other RNA
ggctataaagccaatttaatttctactattgtagat

SEQ ID NO: 305 - RNA, 37 nt, unidentified
  source 1..37: mol_type = other RNA
agtctaaatgacaaataaaatttctactattgtagat

SEQ ID NO: 306 - RNA, 36 nt, unidentified
  source 1..36: mol_type = other RNA
ggctataaggcctcaataatttctactgttgtagat

SEQ ID NO: 307 - RNA, 36 nt, unidentified
  source 1..36: mol_type = other RNA
gtctataagacgattctaatttctactattgtagat

SEQ ID NO: 308 - RNA, 36 nt, unidentified
  source 1..36: mol_type = other RNA
gtctataaggcctcaataatttctactattgtagat

SEQ ID NO: 309 - RNA, 36 nt, unidentified
  source 1..36: mol_type = other RNA
ggctaataagtcgatgtaatttctactattgtagat

SEQ ID NO: 310 - RNA, 36 nt, unidentified; identical to SEQ ID NO: 309
  source 1..36: mol_type = other RNA

SEQ ID NO: 311 - RNA, 36 nt, unidentified
  source 1..36: mol_type = other RNA
ggctaataagccagtggaatttctactattgtagat

SEQ ID NO: 312 - RNA, 36 nt, unidentified
  source 1..36: mol_type = other RNA
ggctaacaagccaatttaatttctactattgtagat

SEQ ID NO: 313 - RNA, 36 nt, unidentified
  source 1..36: mol_type = other RNA
ggctataaagccataacaatttctactattgtagat

SEQ ID NO: 314 - RNA, 36 nt, unidentified
  source 1..36: mol_type = other RNA
ggctagtaagcttcaataatttctactattgtagat

SEQ ID NO: 315 - RNA, 36 nt, unidentified
  source 1..36: mol_type = other RNA
gtctataaggacttgataatttctactatcgtagat

SEQ ID NO: 316 - RNA, 36 nt, unidentified; identical to SEQ ID NO: 315
  source 1..36: mol_type = other RNA

SEQ ID NO: 317 - RNA, 36 nt, unidentified
  source 1..36: mol_type = other RNA
ggctataaagcctaagtaatttctactattgtagat

SEQ ID NO: 318 - RNA, 36 nt, unidentified
  source 1..36: mol_type = other RNA
gtctaagacagcatttaaatttctactattgtagat

SEQ ID NO: 319 - RNA, 36 nt, unidentified
  source 1..36: mol_type = other RNA
ggctataagccttattaaatttctactattgtagat

SEQ ID NO: 320 - RNA, 36 nt, unidentified
  source 1..36: mol_type = other RNA
gtctaaatgacttttataatttctactattgtagat

SEQ ID NO: 321 - RNA, 36 nt, unidentified
  source 1..36: mol_type = other RNA
ggctactcgcctaattaaatttctactattgtagat

SEQ ID NO: 322 - RNA, 36 nt, unidentified
  source 1..36: mol_type = other RNA
gtctgaaagacacatataatttctactattgtagat

SEQ ID NO: 323 - RNA, 36 nt, unidentified
  source 1..36: mol_type = other RNA
ggctatagtaattttataatttctactattgtagat

SEQ ID NO: 324 - RNA, 36 nt, unidentified
  source 1..36: mol_type = other RNA
ggctatagtaattttataatttctactatcgtagat

SEQ ID NO: 325 - RNA, 36 nt, unidentified
  source 1..36: mol_type = other RNA
gtctaattgactttattaatttctactgttgtagat

SEQ ID NO: 326 - RNA, 36 nt, unidentified
  source 1..36: mol_type = other RNA
gtctataagactattataatttctactattgtagat

SEQ ID NO: 327 - RNA, 36 nt, unidentified
  source 1..36: mol_type = other RNA
gtctataggacttggataatttctactattgtagat

SEQ ID NO: 328 - RNA, 36 nt, unidentified
  source 1..36: mol_type = other RNA
ctctatgaggcacatttaatttctactattgtagat

SEQ ID NO: 329 - RNA, 36 nt, unidentified
  source 1..36: mol_type = other RNA
gtctataagacttaagtaatttctacttttgtagat

SEQ ID NO: 330 - RNA, 36 nt, unidentified
  source 1..36: mol_type = other RNA
ggctataaagctgattaaatttctactattgtagat

SEQ ID NO: 331 - protein, 1355 aa, unidentified
LLFIIEFEEKIMKTIENFCGQKNGYSRSITLRNRLIPIGKTEENIEKLQLLDNDIKRSKAYVEVKSMIDDFHRAFIEEVLSKAKLEWGPLYDLFDLFQNEKDKHKKSKIKKELETIQGVMRKQIVKKFKDDDRFDKLFKKEILTEFVPTVIKADESGTISDKRAALDVFKGFATYFTGFHQNRQNMYSEEAKATAISNRIVNENFPKFYANVKVFECLQKEYPAIITETEEALSEILNGKKLADIFSADGFNSVLSQSGIDFYNTIIGGIAGEAGTQKLQGINEKINLARQQLPTEEKNKLKRKMSVLYKQILSDRSTASFIPIGFESSDEVYESVKQFKEQSLDNVISAAKELFEKSDYDLSQIYVPAKEVTDFSLKLFGNWSILHDGLFLIEKDNSKKTFTEKQIENLRKEIAKTDCSLADLQNAYERWAKENDVKAEKTVKNYFKIAELRADGKSREKTSVEILNKIESTFEKIDFEKRDNLIKEKETATPIKEFLDEVQNLYHYLKLVDYRGEEQKDTDFYSKYDEILQTLSEIVPLYNKVRNFVTKKPNEVKKVKLNFDNVSLAKGWDVNKESDYTCILLRRSGLYYLGVLNPKDKPKFDSENNGETSINKNDCYEKLVYKYFKDVTTMIPKCSTQLNDVKQHFKNSNEDYILENNNFIKPLVISKRIFDLNNKTFDEKKMFQIDYYRNTGDLKGYTEAVKDWISFCMTFVHSYKSTCIYDFSSLGDCSQFKQVDQFYKEINLLLYKIWFVNVTAEKINSLVDSGKLFLFQIYNKDYSTGKDGGNGSTGKKNLHTMYWENLFSEENLRDVCLKLNGDAELFWRDANPDVKDVCHKKGSVLVNRTTSDGETIPEEIYQEIYKFKNPNKQEKSFKLSDTAKELLDSGKVGFKEAKFDIIKDRHFTQKTYLFHCPITMNFKAPEITGRKFNEKVQQVLKNNPDVKVIGLDRGERHLIYLSLINQKGEIELQKTLNLVEQVRNDKTVSVNYQEKLVQKEGERGKARKNWQTISNIKELKEGYLSNIVHEIAKLMVENNAIVVMEDLNFGFKRGRFAVERQVYQKFENMLIEKLNYLVFKDKKVAEPGGVLNAYQLTDKVANVSDVGKQCGWIFYIPAAYTSKIDPKTGFANLFYTAGLTNIEKKKDFFDKFDSIRYDRKTDSFVFTFDYSDFGDNADFKKKWELYSRGERLVFSKAEKSVVHVNPTENLKALFDKQGINWSSEDNIIDQIQAVQAERENCAFYDGLYRSFTAILQMRNSVPNSSKGEDDYLISPVMAEDGSFYDSREEAEKGKTTDGKWISKLPVDADANGAYHIALKGLYLLQNNFNLNENGYIENISNADWFKFVQEKEYAK

SEQ ID NO: 332 - protein, 1317 aa, unidentified
MVISYTFGGKKMKAVEKFCGQKNGYSRSITLRNRLIPIGKTEENIQKLKLLDKDMERAKAYDEVKKLIDEFHRTFIEEVLSKASFEWAPLYDQFDLFQTEKDKLKKNKIKKELEVLQGVMRKKIVESFKKDKRFEKLFKKELLTEFVPAVIKNDESGTITDKQAALNVFKGFATYFTGFHQNRQNMYSEEAQSTAISNRIVNENFPKFYANVKVFEYLKNNYPEIINETEKALEEFLNEKKLADIFSPENFNAVMSQSGIDFYNTVIGGIADEAGTKKLQGLNEKINLASQQLPSEEKYKLKKKMTILYKQILSDRNTASFIPVGFEKSEEVYESVKHFKEEILDKVITNTKKLFDSVDYDLGQIYVPAKEVTEFSLKLFGNWSIIHNGMFLLEQDMAKKVLSEKQIEALKKEIAKRDLSLSDLQNAYERWTKENDVKAEKNVRNYFKLTELRVDEKTKEKDSIEILKNLEVLYSKIDFEKQENLIQEKTSATPIKDYLDEIQNLYHYLKLVDYRGEEQKDTDFYSKYDEIIQTLSEIIPLYNKVRNFVTKKPNEIKKVKLNFDCPTLANGWDLNKESSNDAIILRKNGNYYLGIFNPKDKPKFEYNNEDSGYEKMIYKLLPGPNKMLPKVFFSAKGLETFRPPKDLVLGYEEGKHKKGDNFDKVFMHKLIDWFKYAINQHEDWKNFNFKFSPTEFYEDMSGFYKEVELQGYKITFNKVSDNCINSLVDSGKLFLFQIYNKDYSTGEEGGNGSTGKKNLHTLYWENLFSEENLRDVCFKLNGEAEFFWRDANPNVKAVCHKKDSVLVNRTTSDGKSIPEEIYQEIYKYKNPEKQEKEFTLSKDAKELLESGTVVCKKAKFTITKDRHFTQQTYLFHCPITMNFKAPEITGRKFNEHVQEILRNNPEVKVIGLDRGERHLIYLSLINQKGEIELQKTLNLVEQVRNDKTVSVNYQEKLVHKEVERDKARKSWQSISNIKELKEGYLSNIVHEIAKLMVENNAIVVMEDLNFGFKRGRFPVERQVYQKFENMLIEKLNYLVFKDKNVTEPGGVLNAYQLADKAVNVSDVGKQCGWIFYIPASYTSKIDPKTGFANLFYTAGLTNIEKKKDFFDKFDSIRYDRKLDSFVFGFDYSNLSDNADYNKKWELYSRGERLVYSKAEKSTISVNPTENLKVLFDKQGIVWDSKDNFIDQIHAVQAERDNVPFYDGLYRSFTAILQMRNSVPNSSKQEDDYLISPVMADDGNFYDSRLEAAKGKDEKGNWISKLPVDADANGAYHIALKGLYLLKNDFNLNEKGYIENISNADWFKFVQNKEYQDC

SEQ ID NO: 333 - protein, 1295 aa, unidentified
MKTIDSFCGQNEGYSRSITLRNKLIPIGETEKNIKEFLEKDVERSEAYPQIKKLIDDIHRGFIEECLSNVSFPWEPLFDQFELYQNEKEKIKKNAKKKELIVLQVAARKRIVKAFKDNKDFEKLFKEELFKELLPQLIKSAPVTEIADKEKALSVFTRFSTYFNGFHENRKNMYSEEEISTGIAYRIVNENFPKFFSNIKLFEYLKDNFPEIIKETEISLKDTLKGKKLCDIFKVEAFNNVLSQSGIDFYNTIISGVAGEGGTQKIKGMNEIINLAKQQLPKEEKDKLHGKMVVLFKQILSDRETASFIPTGFEKNEEVYASIKEFNNIIVKDSVTETRNLFALNSDIKLNEIIVPAKSITAFSLTIFGNWVIISEGLYLLEKDKITKALSEKQEEQLHKDIDKKDCNLEEIQSAYERWCSENGEIVRTSVRKYFNLIETQSSSSENTSTKKEVCILDEITKSFSQIDFENEKDLQQEKEAATPIKIYLDEVQNLYHHLKLVDYRGEEQKDSNFYSKFDEIIEKLSEIISIYNKVRNFVTKKPGEVKKVKLNFDCPTLANGWDENKEKDNDAILLLKDGNYYLGIYNPKNKPKFDFEESKASDCYKKVVYKLLPGPNKMLPKVFFSAKGQKEFLPPKELLLGYEEGKHKKGENFDKEFMYKLIDWFKDAINRHEDWKKFDFKFSDTRSYEDMSAFYKEVELQGYKISFKKVSTEIINEFVNSSKLFLFQIYNKDFAVKATGKKNLHTLYWENLFSEENLKDICFKLNGEAELFWRKASLIKEKVTVHKKNSILINRTKKDGSTIPENLYQEIYQYKNNMISDISENAKDLLNSGKVICKKATHDITKDKHFTEDAYLFHCPITMNFKAPEITGRKFNDKVLEALKENPEIKIIGLDRGERHLIYLSLINQKGEIELQKTLNLVDQIRNDKTVQINYQEKLVQNEGDRDKARKNWQTIGNIKELKEGYLSAIIHEIATLMIENNAIVVMEDLNFGFKHGRFAVERQVYQKFENMLIEKLNYLVFKDRSIKEPGGVLNAYQLTDKAANVSDVYKQCGWLFYIPAGYTSKIDPKTGFANLFVTKGLTNVEKKKDFFSKFDSIYYDEKEACFVFAFDYSKFGDNADFKKKWEVYTKGERLVYSKQERKSITVSPTEELKKIFNEFSINWNNSESVLDQIKTIPAEKLNAKFFDTLLRAFNATLQMRNSVPNSSRQEDDYLISPVKARDGTFYDSRIEAEKGIDKNGRWVSKLPVDADANGAYHIALKGLYLLENNFNRNEKGVIQNISNVEWFKFAQTK

SEQ ID NO: 334 - protein, 1293 aa, unidentified
MARIIDEFCGQMNGYSRSITLRNRLVPIGKTEENLKQFLEKDLERATAYPDIKNLIDAIHRNVIEDTLSKVALNWNEIFNILATYQNEKDKKKKAAIKKDLEKLQSGARKKIVEAFKKNPDFEKLFKEGLFKELLPELIKSAPVDEIAVKTKALECFNRFSTYFTGFHDNRKNMYSEEAKSTAISYRIVNENFPKFFANIKLFNYLKEHFPRIIIDTEESLKDYLKGKKLDSVFSIDGFNSVLAQSGIDFYNTVIGGISGEAGTKKTQGLNEKINLARQQLSKEEKNKLRGKMVVLFKQILSDRETSSFIPVGFANKEEVYSTVKEFNNSIAEKAVSKVRDLFLHREEFTLNEIFVPAKSLTDFSQAIFGSWSILSEGLFLLEKDSMKKALSESQEEKINKEIAKKDCSFTELQLAYERYCTEHNLPVEKFCKDYFDIVDYRGNGAKSEKTKVSILSEILETFLQLDFDHIQDLQQEKNAAIPIKAYLDEVQNLYHHLKLVDYRGEEQKDSTFYSKHDEILTDLSQIVPLYNKVRNFVTKKLGESKKIKLNFDCPTLANGWDENQESSNDAIILRKDGKYYLGIYNPNNKPKFAKKDSIVGDCYEKMAYKQIALPMGLGAFVRKCFGTAQKYGWGCPENCLNSEGKIIIKDEEAKGNLEAIIDCYKDFLNKYEKDGFKYKDYNFSFLDSASYEKLSDFFNDVKPQGYKLSFTSIPLSEIDKMIDEGKLFLFQIYNKDFAKKATGKKNLHTLYWENLFSVENLQDVVLKLNGEAELFWREASIKKDKVIVHKKGSILVNRTTTDGKSIPEAIYQEIYQLKNKMADSISDEAKRLLESGTVVCKVATHDIVKDKHFTENTYLFHCPITMNFKAKDRTNKEFNNHVLEVLNKNPDIKVIGLDRGERHLLYLSLINQKGEIECQKTLNLVEQVRNDKTVSVNYHEKLVHKEGSRDAARKNWQTIGNIKELKEGYLSAVVHEIASLMVKHNAIVVMEDLNFGFKRGRFAVERQIYQKFENMLIEKLNYLVFKDRKVTEPGGVLNAYQLANKSAKVTDVYKQCGWLFYIPAAYTSKIDPRTGFANLFITKGLTNVEKKKEFFGKFDSIRYDATESCFVFSFDYAKICDNADYKKKWDVYTRGTRLVYNKTERKNVSVNPTEELQCVFDEFGIKWNTGEDLIESISLIPAEKSNAKFFDVLLRMFNATLQMRNSVPNTDTDYLVSPVKAEDGSFFDSREEFKKGGDARLPIDCDANGAYHIALKGLYLLLNDFNRDNKGVIQNISNKDWFKFVQEKVYKD

SEQ ID NO: 335 - protein, 1307 aa, unidentified
MATIENFCGQENGYSRSITLRNKLIPIGKTANNLKQFLEKDQERADVYPEIKKLIDEIHRGFIEDTLSKFSFVWEPLFDDFELYQNEKDKSKKATKKKDLEKFQSGARKKIVEAFKKHPDYDKLFKDGLFKELLPALIKNSSDSEISNKEEALKVFDRFSTYFVGFHENRKNMYSEEDKSTAISYRIVNENFPKFYANVKLYNYIKENFPKIISETEESLKNHLNGKRLDEIFNAESFNDVLAQSGIDFYNTVIGGISTETEKVQGLNEKINLARQKLPAEEKNKLRGKMVVLFKQILSDRGTSSFIPVGFNNKEEVYSSVKSFNDEFVNISVCETKELFKQVAEFNLSEIYVPAKSLTNFSQNIFGSWSILTEGLFLLEKDKVKKALSENKEEKINKEIAKKDYSLDELQVAYERYCNEHNFSVEKNCKDYFDVVDYRSENEKSDKKKISILSAITESYSKIDFENIHDLQQEKEAATPIKTYLDEVQNLYHHLKLVDYRGEEQKDSNFYSKLDEIITQLSEIIPLYNKVRNFVTKKPGEMKKIKLNFDCPTLANGWDENKESSNDAIILRKDGKYYLGIFNPNNKPKFSKIENISESYYEKMVYKLLPGPNKMLPKVFFSTKGQETFLPPKDLLLGYDAGKHKKGDAFDKEFMYKLIDWFKDAINRHEDWKKFNFVFSPTKSYEDMSGFYREVELQGYKVSFQKISDTEINSFVSNGKLFLFQIYNKDFALKASGKKNLHTLYWENLFSEENLKDVCLKLNGEAELFWRKPSLNKEKVTVHEKGSILVNRTTNDGKSIPEDIYQEIYQFKNKMKDKISDNISIQNDDGKVITITVTLENKQKEKFTENYKVVYKTATHYITKDNRFTEDTYLFHCPITMNFKAPDKSNKEFNNHVLEVLSGNPNVKIIGLDRGERHLIYLSLINQKGEIELQKTLNLVEQVRNDKTVKVNYQEKLVHKEDDRDKARKSWQTIGNIKELKEGYLSNVVHEIAKMMVEHNAIVVMEDLNFGFKRGRFAVERQIYQKFENMLIEKLNYLVFKDKKVTEPGGVLNAYQLTNKSANVSDVYRQCGWLFYIPAAYTSKIDPKTGFANLFITKGLTNVEKKKEFFDKLDSIRYDSKEDCFVFGFDYGKICDNADFKKKWEVYTKGERLVYNKTERKNININPTEELKSIFDDFGINWNNEENFIDSVHTIQAEKSNAKFFDTLLRMFNATLQMRNSIPNTEIDYLISPVKSEDGTFFDSREELKKGENAKLPIDADANGAYHIALKGLYLLENDFNRNDKGVIQNISNADWFKFVQEKEYRD

SEQ ID NO: 336 - protein, 1298 aa, unidentified
MTTINKFCGQGNGYSRAITLRNKLIPIEKTADNLKQFLEKDQERADSYPEIKKLIDEVHRGFIEDTLTKFSFVWEPLFDDFELYQNEKDKSKKAAKKKDLEKFQSGARKKIVEAFKKHPDYDKLFKDGLFKELLPALIKNSSDSEISNKEEALKVFDRFSTYFVGFHENRKNMYSEEEKFTAISYRIVNENFPKFYANVKLYNYLKENFPQIISETEESLKNHLNEKKLDEIFNVESFNDVLAQSGIDFYNTVIGGISTETEKVQGLNEKINLARQKLPAEEKNKLRGKMVVLFKQILSDRGTSSFILVDFNNKEEVYSSVKSFNDEFVNLSVCETKELFKQVAEFNLSEIYVPAKSLTNFSQNIFGSWSILTEGLFLLEKDKMKKALSENQEEKINKEIAKKDYSLDELQVAYERYCNEHNFSVEKNCKDYFDVVDYRSENEKSDKKKVSILSAITESYSKIDFENIHDLQQEKEAATPIKTYLDEVQNLYHHLKLVDYRGEEQKDSNFYSKLDEIITQLSEIIPLYNKVRNFVTKKPGEMKKIKMMFDCSSLLGGWGTDYGTKEAHIFIDSGKYYLGIINEKLSKDDVELLKKSSERMVTKVIYDFQKPDNKNTPRLFIRSKGTNYAPAVSQYNLPIESIIDIYDRGLFKTEYRKINPEVYKESLIKMIDYFKLGFERHESYKHYPFCWKESSKYNDIGEFYKDVINSCYQLHFEKVNYDNLLKLVENNKIFLFQIYNKDFAEKKSGKKNLHTLYWENLFSEENLKDVCLKLNGEAELFWRKPSLNKEKVTVHKKGSILVNRTTNDGKSIPEDIYQEIYQFKNKMIDNLSENAKSLLDSGVVVCKEATHNITKDNRFTEDTYLFHCPITMNFKAPDKSNKEFNNQVLEVLSDNPDVKIIGLDRGERHLIYLSLINQKGEIELQKTLNLVDQVRNDKTVKVNYQEKLVHKEGDRDKARKNWQTIGNIKELKEGYLSNVVHEIAKMMVEHNAIVVMEDLNFGFKRGRFAVERQIYQKFENMLIEKLNYLVFKDKKVTEPGGVLNAYQLTNKSANVSDVYRQCGWLFYIPAAYTSKIDPKTGFANLFITKGLTNVEKKKEFFDKFDSIRYDSKEDCFVFGFDYGKICDNADFKKKWEVYTKGERLVYNKTERKNISINPTEELKSIFDDFGINWNNEDNFIDSVHTIQAEKSNAKFFDTLLRMFNATLQMRNSIPNTEIDYLISPVKSEDGTFFDSREELKKGENAKLPIDADANGAYHIALKGLYLLENDFNRNDKGVIQNISNADWFKFVQGKEYEK

SEQ ID NO: 337 - skipped

SEQ ID NO: 338 - DNA, 3954 bp, unidentified
  source 1..3954: mol_type = other DNA
atggtgattagctacacatttgggggcaagaaaatgaaggctgtggagaaattttgcggccagaaaaatggatacagtcggtcgattactctgcgtaataggctgatccctattgggaaaaccgaagagaacattcaaaaactcaagctcctcgataaagatatggagcgcgctaaggcttatgacgaagtcaagaaactcatagatgagttccacaggacatttattgaagaagtcctttcaaaggcttcctttgagtgggcaccactttacgaccagtttgatctgtttcaaaccgagaaggataagctgaagaagaacaagatcaagaaagagctggaagtgctccaaggggtgatgaggaagaaaatcgtagagtctttcaagaaggataaaaggttcgaaaaactgttcaagaaggagttgctgacagagttcgttcctgcagtcattaagaatgacgaatctggtacaattacagataagcaggccgcactaaatgtcttcaaagggtttgcgacctattttacagggtttcaccagaatcggcagaacatgtatagcgaagaggcccagtctaccgcgatctctaatcggattgtgaatgagaacttccctaagttttacgccaacgtgaaggtcttcgagtaccttaaaaataactacccagagatcataaacgagacagaaaaggcacttgaggagttcctaaatgaaaagaaactggctgatatcttcagtcccgagaactttaacgccgtgatgtcccagtcaggcatagacttctataacaccgtgattgggggtattgcggatgaagctggcaccaagaagctccaaggtttgaacgaaaaaattaatctggcctcccagcagttaccgagcgaggagaagtacaagctaaagaagaaaatgacgattctgtacaaacagattctttccgaccgaaatacagcttcattcatacccgtaggtttcgaaaaaagtgaagaagtatatgagagcgtcaaacatttcaaagaggagattctggacaaggtgattaccaacaccaagaaattgttcgactcagtggattatgatctgggccaaatctatgttcctgcaaaggaagtaaccgagttttcccttaagctgtttggaaactggtctatcatacataatgggatgtttctgttggagcaggatatggccaaaaaagtattgtcagaaaaacagatcgaggcactcaaaaaggaaattgccaaacgcgaccttagcttatcagatttgcagaatgcttacgaaaggtggactaaggaaaacgatgttaaagctgaaaagaacgtgcggaattattttaagctgactgagctgcgcgtggacgagaaaacaaaggaaaaagatagcatcgagatcttgaagaatctggaagtactttacagtaagatcgattttgagaagcaggagaatctaatacaggagaagacttcagccactcctattaaagactatctggacgagatccagaacttataccactatctgaagttagttgactatagaggagaagagcagaaagacacagacttctatagcaagtacgacgaaataatccaaacactgagtgagattatcccgctctataataaggtgagaaacttcgtgacaaagaagcccaacgaaatcaaaaaggttaagctgaacttcgactgcccaactcttgccaatggatgggatctcaacaaagagtcatctaacgacgccattatcttgcgcaagaatggtaactactacctgggcattttcaatccaaaggacaaaccaaagtttgagtacaataatgaagactctggatatgagaagatgatctacaagctgctgcccggccccaataagatgctgccaaaggtgttttttagcgcgaaagggctggagacgtttcggccccccaaggatctggtcctaggctacgaggaaggaaaacataaaaagggtgacaatttcgacaaggtctttatgcataaactgatagactggtttaagtacgcaataaatcagcacgaggactggaaaaactttaacttcaaattcagccctactgagttctacgaggatatgtcgggcttttacaaagaagtggagttgcagggctacaaaatcacgttcaacaaggtgagtgataattgcatcaattccctcgtcgacagtggaaaactgtttctgtttcagatctacaacaaggattattccacgggggaagaaggcggcaacggatccactggcaagaagaatctgcataccctttactgggaaaatctcttttccgaagaaaatttgcgagatgtgtgctttaaactgaatggtgaggccgaattcttttggagagacgctaatcctaatgtcaaagcggtgtgtcacaaaaaagactctgtgctcgtcaacaggaccacctccgacgggaagtctattccagaggaaatttaccaggagatctacaagtacaagaacccagagaagcaagagaaggagttcaccctttccaaagatgctaaagagctcctggagtctgggacagtggtgtgtaagaaagctaaattcaccattacgaaagatcggcattttacccagcaaacctatttattccattgccctatcacaatgaacttcaaggcccccgagatcactggacgcaaatttaatgagcacgtccaggagatcctccgcaataatccagaagtaaaggtgattggactagacagaggcgaaagacatctgatctatttgtcgctcatcaatcagaaaggggaaatcgagcttcaaaagaccctcaatctggtggagcaggtgcgaaacgataagactgtgagtgttaactaccaggagaagctggtgcacaaagaagtggagcgagataaagcccggaagtcctggcagtcaatctcgaacatcaaggaacttaaagaggggtacttgagcaatattgtgcacgagatcgccaagttgatggtggaaaacaatgcaattgttgtaatggaagatctcaacttcggttttaagcgtggccgatttcccgtcgaaaggcaggtttaccaaaaattcgagaacatgctaatagaaaagctaaactacctggtattcaaggacaaaaacgtgacggaaccgggtggcgttttaaacgcctatcagctcgctgacaaagccgttaacgtcagcgacgtgggaaagcaatgtggctggattttttatatacctgccagctatactagtaagatcgatccaaagactggattcgcaaatctgttctataccgcggggctgactaatatcgaaaagaagaaggatttcttcgacaaatttgacagtatcaggtacgacagaaaattagatagctttgttttcggattcgattactctaacttatccgacaacgccgactacaataagaaatgggagctctacagtcggggagagcgccttgtctattccaaagctgagaaaagcacaatctccgttaacccgaccgagaatctgaaggtgctgttcgataaacagggcattgtgtgggactctaaggacaactttatcgatcagattcacgcagttcaggctgagagagataacgtccccttctatgacggactttataggtccttcactgccatactgcaaatgagaaactctgtccctaactcatctaaacaggaagacgattacctcatctcacccgtgatggccgatgacgggaatttttatgatagccgtctggaggccgcaaagggcaaagacgagaagggcaactggataagcaagctgcccgttgacgctgacgccaacggtgcataccacatcgccttaaagggcctctatttgctcaagaatgatttcaacctgaacgaaaaagggtatatcgaaaacataagcaatgcagattggttcaaattcgtccaaaacaaagagtatcaggactgttga

SEQ ID NO: 339-342 - skipped (4 entries)

SEQ ID NO: 343 - DNA, 36 bp, unidentified
  source 1..36: mol_type = other DNA
atctacaacagtagaaatttagtatgaagttcaaac

SEQ ID NO: 344 - DNA, 34 bp, unidentified
  source 1..34: mol_type = other DNA
ctacaacagtagaaatttagtatgaagttcaaac

SEQ ID NO: 345 - DNA, 36 bp, unidentified
  source 1..36: mol_type = other DNA
atctacaacagtagaaattctatattagtttgaaac

SEQ ID NO: 346 - DNA, 35 bp, unidentified
  source 1..35: mol_type = other DNA
tctacaacagtagaaattctatattagtttgaaac

SEQ ID NO: 347 - DNA, 36 bp, unidentified
  source 1..36: mol_type = other DNA
gtttcaaactaattaagaatttctactgttgtagat

SEQ ID NO: 348 - DNA, 35 bp, unidentified
  source 1..35: mol_type = other DNA
tttcaaactaattaagaatttctactgttgtagat

SEQ ID NO: 349 - DNA, 36 bp, unidentified
  source 1..36: mol_type = other DNA
gtttcagtctgatattgaatttctactgttgtagat

SEQ ID NO: 350 - DNA, 35 bp, unidentified
  source 1..35: mol_type = other DNA
tttcagtctgatattgaatttctactgttgtagat

SEQ ID NO: 351 - DNA, 36 bp, unidentified
  source 1..36: mol_type = other DNA
gtttgaacttcttattaaatttctactgttgtagat

SEQ ID NO: 352 - DNA, 35 bp, unidentified
  source 1..35: mol_type = other DNA
tttgaacttcttattaaatttctactgttgtagat

SEQ ID NO: 353 - DNA, 36 bp, unidentified
  source 1..36: mol_type = other DNA
gtttaaacgaactattaaatttctactgttgtagat

SEQ ID NO: 354 - DNA, 35 bp, unidentified
  source 1..35: mol_type = other DNA
tttaaacgaactattaaatttctactgttgtagat

SEQ ID NO: 355 - RNA, 36 nt, unidentified
  source 1..36: mol_type = other RNA
gtttgaacttcatactaaatttctactgttgtagat

SEQ ID NO: 356 - RNA, 36 nt, unidentified
  source 1..36: mol_type = other RNA
gtttcaaactaatatagaatttctactgttgtagat

SEQ ID NO: 357 - RNA, 36 nt, unidentified
  source 1..36: mol_type = other RNA
gtttcaaactaattaagaatttctactgttgtagat

SEQ ID NO: 358 - RNA, 36 nt, unidentified
  source 1..36: mol_type = other RNA
gtttcagtctgatattgaatttctactgttgtagat

SEQ ID NO: 359 - RNA, 36 nt, unidentified
  source 1..36: mol_type = other RNA
gtttgaacttcttattaaatttctactgttgtagat

SEQ ID NO: 360 - RNA, 36 nt, unidentified
  source 1..36: mol_type = other RNA
gtttaaacgaactattaaatttctactgttgtagat

SEQ ID NO: 361 - protein, 1396 aa, unidentified
XXXXXXFXXKXMKTIEXFCGQKNGYSRSITLRNXLIPIGKTEENJKZZQFLEKDQERAXAYPEIKKLIDEIHRGFIEXTLSKXSFXWEPLFDXFELYQNEKDKSKKAAXKKXLEKLQSGARKKIVEAFKKXPDFXKLFKXXLFKELLPALIKNXXXXEISDKEXALKVFXRFSTYFTGFHENRKNMYSEEAKSTAISYRIVNENFPKFYANVKLFXYLKENFPEIISETEESLKXHLNGKKLDDIFSXEXFNXVLXQSGIDFYNTVIGGIXGEAGTXKXQGLNEKINLARQQLPXEEKNKLRGKMVVLFKQILSDRXTXSFIPVGFENKEEVYSSVKXFNXEIVBKSVXETKELFXQVXXFBLSEIYVPAKSLTBFSXXIFGXWSILXEGLFLLEKDKMKKALSEKQEEKJNKEIAKKDCSLDELQXAYERXCXEXNXXVEKNXKDYFDXVXYRZZSXXXKSEKKKVSILSXITESXSKIDFENIHDLQQEKEAATPIKTYLDEVQNLYHHLKLVDYRGEEQKDSNFYSKXDEIITXLSEIIPLYNKVRNFVTKKPGEXKKXKLNFDCPTLANGWDENKESSNDAIILRKDGKYYLGIXNPKZNKPKFXKEXXZZZZZISXDCYEKMVYKLLPZZZGPNKMLPKVZZZZZZZZZFFSAKGQEXFZZZZZZZLPPKDLJZZZZZZZZZZZZZZLGYDEGKHKKZZZZZGDXFDKEFMXKLIDWFKDAINRHEZZZZDXKKZZZXNFZXFSDTSSYEDMSGFYKEVELQGYKISFXKVSDEEINSLVDSGKLFLFQIYNKDFATZZZZZZKATGKKNLHTLYWENLFSEENLKDVCLKLNGEAELFWRKASLNKEKVTVHKKGSILVNRTTXDGKSIPEXIYQEIYQFKNKMKDEZZZZJSDNAKELLDSGZZZZZZZZZZZZZZZZZZZZZKVVCKXATHDITKDXHFTEDTYLFHCPITMNFKAPXITXXXFNNHVLEVLXNNPDVKXIGLDRGERHLIYLSLINQKGEIELQKTLNLVEQVRNDKTVSVNYQEKLVHKEGDRDKARKNWQTIGNIKELKEGYLSNXVHEIAKLMVEXNAIVVMEDLNFGFKRGRFAVERQXYQKFENMLIEKLNYLVFKDKKVTEPGGVLNAYQLTBKSANVSDVYKQCGWLFYIPAAYTSKIDPKTGFANLFITKGLTNVEKKKXFFDKFDSIRYDXKEDCFVFGFDYSKICDNADFKKKWEVYTXGERLVYXKTERKNISVNPTEELKSIFDXFGINWNNEXNFIDXIHTIQAEKSNAKFFDTLLRMFNATLQMRNSVPNXXZZEDDYLISPVKAEDGTFXDSREEAKKGXDZZXZXZXKLPXDADANGAYHIALKGLYLLENDFNRNEKGVIQNISNADWFKFVQEKEYXDC

SEQ ID NO: 362 - DNA, 4068 bp, unidentified
  source 1..4068: mol_type = other DNA
ttgttgtttataattgagtttgaggagaaaattatgaaaacaattgaaaatttttgtggccaaaaaaatggttattctcgctctattaccttgcgaaacaggttgattccaatcggaaaaacagaagaaaatattgaaaaactacaacttcttgataatgacattaagcgttcaaaggcttatgttgaagtcaagtcgatgatagatgattttcaccgcgcattcatagaagaagttctttctaaggcaaaacttgaatgggggccattatatgacctgtttgatttgttccagaatgaaaaagacaagcataagaaaagtaaaataaaaaaagagttagaaaccattcaaggtgtgatgcgaaaacagattgtaaaaaagtttaaggatgatgataggtttgacaagcttttcaagaaagaaattttaactgaatttgttccaactgtaataaaggctgatgaatcaggaactatatccgacaagcgggcagctcttgatgtgtttaagggatttgcgacatattttacaggttttcaccaaaacagacaaaatatgtatagcgaagaggctaaggctaccgctatcagcaatagaatagttaatgaaaattttccaaagttctatgcaaatgtaaaggtttttgaatgcttgcagaaagagtatcctgcaattatcactgaaacggaagaggctctttctgaaatccttaatggcaaaaaactggctgatatttttagcgcggacggatttaattcagttttgagccagagcggcattgatttttataatacgataattggcggcattgcaggagaggcaggaactcaaaagttgcaaggcataaacgaaaaaataaatcttgcccgccagcagcttcctacagaagaaaaaaacaagctcaagcggaagatgagtgtattatacaagcagattttaagcgacagaagtacggcttcttttattccgattggatttgaatcaagcgatgaagtttacgaatctgtaaaacagtttaaggaacagtcattagataatgtcatttccgctgcaaaagaattgtttgaaaaatctgattatgatttgagtcagatttatgttcctgcaaaagaagtcaccgacttttcattgaagctttttggcaattggtcgattttgcatgacgggcttttcttaattgagaaagataattcaaagaagactttcacggaaaagcagattgaaaacctaagaaaagaaatcgcaaaaacagattgttctcttgcggatttgcagaacgcctatgagcgatgggcaaaagaaaatgatgttaaagctgaaaagactgtaaagaactatttcaaaattgcagagcttcgcgctgatggaaaatcaagagaaaaaacttctgtggagattctgaataaaattgaatcgacctttgagaaaattgattttgaaaagcgagataatcttataaaggaaaaggagacggcaactccgataaaagaattcctcgacgaagttcagaacctttatcattatctgaaattggttgactatcgtggtgaagaacagaaggacaccgatttttattcaaaatatgatgaaatactgcagacgctttctgaaattgttccgctttataataaggtgagaaattttgtcacaaaaaagcctaatgaggtgaagaaagtaaagctgaattttgataatgtttcattagcaaaaggttgggatgtaaacaaagaatctgattatacatgtattttactccgcagaagtggactgtattatttaggagtactaaatccaaaagataagccaaagtttgactctgagaacaatggtgaaacaagtataaataagaatgattgttacgaaaagcttgtttataagtattttaaggatgtaacaaccatgattccaaaatgttcgacacagttaaatgatgttaaacagcattttaaaaactctaatgaagattatattttggaaaacaataattttattaagccacttgtaatttcaaagagaatttttgatctgaataataaaacttttgatgaaaagaaaatgtttcaaattgactattataggaatactggcgatttaaaaggttatacagaagctgtaaaagattggatttcattttgtatgacctttgttcattcctataaaagtacctgtatatatgatttttcttccttaggcgattgcagccaatttaagcaggttgatcagttttacaaagagattaatcttttactttataaaatttggtttgtgaatgtaactgctgaaaaaatcaattcccttgtagattccggtaaacttttccttttccaaatctacaacaaagactattcaactggtaaagacggcggaaacggttcaacaggcaaaaagaatcttcatacgatgtattgggaaaatttgttcagcgaagaaaatcttcgggatgtctgccttaaattgaatggagatgcagaacttttctggcgggatgcaaatcctgatgtgaaagatgtatgccataaaaaaggttcagttcttgtaaacagaacgacctctgacggtgagacaatcccagaagaaatatatcaagaaatttacaagttcaaaaatcctaataaacaggaaaaaagctttaaactttctgataccgcaaaagaacttctggatagtggaaaagtcggtttcaaagaggccaaatttgacattatcaaagaccgtcattttacacagaaaacatatctgttccattgtccgattaccatgaattttaaggctcctgaaattacaggaagaaaattcaatgaaaaagtccagcaggtgttgaaaaataatcctgatgtaaaggttattggtcttgaccgtggcgagcgtcatttgatttatctttcgcttatcaatcaaaagggcgaaatcgagcttcagaaaacgctcaaccttgtggaacaggttcgcaatgataaaactgtttctgtaaattatcaggagaaactagtccagaaggagggagagcgtggcaaggctcgcaagaactggcaaacaatcagcaatatcaaagaattaaaagaaggatatctttcaaacattgttcacgagattgcaaaattaatggtagaaaataatgcaattgtcgtaatggaagatttgaattttggatttaaacgaggacgatttgcggttgagcgtcaagtttaccagaagtttgaaaacatgctcattgaaaagcttaattatcttgtgttcaaggataagaaagtcgctgagcctggtggcgttttgaatgcatatcagctaactgacaaagttgcaaatgtaagcgatgttggcaaacagtgcggatggattttctatattccggctgcgtatacttcaaaaattgatccaaagactggttttgcaaatcttttttatactgcagggcttacaaatatcgaaaagaaaaaagatttctttgataagtttgattctattcgctatgacagaaaaacagattcgtttgtgttcacttttgattacagcgactttggagataatgcggactttaagaaaaaatgggaactctattctaggggagagcgacttgttttcagcaaggcagagaaatctgttgttcatgtaaatccaacagaaaacttaaaggcattgttcgacaagcaagggataaactggagttcagaagataatattatagaccagatacaggcagtgcaggctgaaagagaaaattgcgctttttatgacggcctataccgttcgtttactgcaattctccagatgcgaaattccgttcctaattcttcaaaaggggaagatgattatctgatttcaccagtcatggcagaagatggaagtttctatgacagccgagaggaagctgaaaaaggaaaaacgactgacggaaaatggatttcaaagcttcctgttgatgctgatgccaacggcgcgtaccatattgcgctaaagggactttatcttttgcagaataatttcaatttaaatgaaaatggctatattgaaaacatttcaaacgccgactggtttaagtttgttcaggagaaggaatatgcaaaataa

SEQ ID NO: 363 - skipped

SEQ ID NO: 364 - DNA, 3888 bp, unidentified
  source 1..3888: mol_type = other DNA
atgaaaactattgattctttttgtggacaaaacgagggttattcacgttcaataacattacgaaataaattgattccaattggagaaactgaaaaaaatattaaagagtttttagaaaaagatgttgaacgatcagaagcttatcctcaaataaagaaattaatagatgatatacatagaggatttatagaagagtgtctttctaatgtttcttttccatgggaaccattatttgatcagtttgagttatatcaaaatgaaaaagaaaagataaaaaagaatgcgaagaaaaaagaacttattgttcttcaagtggcagcacgaaaacgaattgtaaaagcatttaaagataataaggattttgaaaagctttttaaggaagaattatttaaggaattattgcctcaattaataaaatctgctcctgttacagaaattgcagataaagaaaaagcactttctgtttttacaagattcagtacatattttaatggttttcatgaaaataggaaaaatatgtatagtgaagaggaaatatcaacaggaattgcatatagaatagtaaacgaaaattttccaaagtttttttcgaacataaaactttttgaatatttaaaagacaactttccagaaattataaaagaaacagagatttcattaaaagacacattaaaaggcaaaaagctttgtgatatttttaaagttgaagcttttaataatgttttatctcagagtggaatagatttttataatacgataattagtggtgttgctggtgaaggtggcacacagaaaattaagggaatgaatgaaataatcaatcttgcaaaacaacaacttccaaaggaagaaaaagataagttacatggcaagatggttgtattattcaaacagattttgagtgatagagagactgcatcatttataccgactggatttgaaaaaaatgaagaagtatatgcttctataaaagagtttaacaatattattgtaaaagattctgttacagaaacaaggaatttgtttgctctaaatagtgatattaagctcaatgaaataattgtgccagcaaaatctattacagcattttctctaacaatatttggaaattgggtaattatttctgaaggtttgtacctattggaaaaagataaaataactaaagctttatcagaaaagcaagaggaacagcttcataaagacattgataaaaaggactgtaatcttgaagaaattcaaagtgcatacgaacgatggtgtagcgagaatggggaaattgttcgtacatctgtaagaaaatattttaatcttattgagacacaatcaagttcatctgaaaacacatcaaccaagaaagaagtgtgcattcttgacgaaataacaaagtctttttctcaaatagattttgaaaatgaaaaagatttacagcaggaaaaagaagcggcaactccaataaaaatatatttagatgaagtacagaatctttatcatcatcttaagcttgttgattatcgtggagaagaacaaaaagattccaatttctattctaaatttgatgaaataatagaaaagctttcagaaattatttctatatataataaggttcgcaattttgtcacaaagaaaccaggagaagtaaaaaaggtaaagcttaattttgattgtccaactcttgctaatggctgggatgaaaataaagagaaggataatgatgcgattcttcttttaaaagatggaaactattatttaggaatttataatccaaaaaataaaccaaaatttgattttgaagaaagcaaagcttctgattgttataaaaaagttgtatataaacttttaccaggaccgaataaaatgcttccaaaagtatttttctcagcgaaaggacagaaagagtttcttccaccaaaagaattgcttttaggatacgaagaaggtaagcataagaaaggagagaattttgataaggaattcatgtataaactgattgattggtttaaggatgcaattaacagacatgaagactggaaaaaatttgattttaaattttcagatacaagaagttatgaagatatgagcgcattttataaagaagtcgaattacagggatataagatttcttttaaaaaggtatctacagaaatcataaatgaatttgtaaatagcagtaaactttttctttttcaaatttataataaagattttgcagtaaaagccactggaaaaaagaatcttcatactctttattgggaaaatttatttagtgaagaaaaccttaaagatatttgcttcaaacttaatggagaagcagaacttttctggcgaaaggcaagtttaatcaaagaaaaagttacggttcataaaaagaattcaattcttataaatcgaacaaaaaaagatggctcaacaattccagaaaatctttatcaggaaatctatcaatataagaataatatgattagtgatatttctgagaatgcgaaagatttactaaattctggaaaagtaatttgtaaaaaagcaacacacgatattacaaaagataaacattttacagaagatgcatatctttttcattgtccaattacaatgaattttaaagctcctgagattacaggtagaaagtttaatgataaagtgcttgaagcacttaaagaaaatcctgaaataaagattattggattggatcgtggtgaaaggcatttgatttatttatctctaattaatcaaaaaggagaaattgaattacaaaaaactctgaatcttgtagaccaaattagaaatgataaaactgtacaaattaattatcaagaaaaattagttcaaaatgagggagatcgagataaagctagaaagaattggcagactataggaaatataaaagaacttaaagaaggctatctttcagctataatacatgaaattgctacattgatgatagaaaacaatgccattgttgttatggaagatttgaactttggttttaagcatggaagatttgctgttgaacgacaagtatatcaaaagtttgaaaatatgcttattgaaaaattgaactatcttgtatttaaagatcgttctataaaagaaccgggtggagttcttaatgcatatcagctcacagataaagctgctaatgtttctgatgtttataaacaatgtggttggcttttctatattcctgcaggatatacttcaaaaatagatccaaaaacaggttttgctaatctatttgtaactaaaggattaacaaatgtagaaaagaagaaggatttcttttcaaagtttgattcaatttattatgatgaaaaagaagcttgttttgtttttgcttttgattatagcaaatttggtgacaatgcagactttaagaaaaaatgggaagtttatacgaaaggtgaaagacttgtttatagtaaacaagaaagaaagtctattactgtaagtccaactgaagaacttaaaaaaatatttaatgagtttagtataaactggaataatagtgaaagtgttcttgaccaaataaaaactattcctgctgaaaaattgaatgctaagttttttgatacattattacgtgcatttaatgctactttgcaaatgcgtaattctgtaccaaattcttcacgacaggaagatgattatttaatatctcctgtaaaagcaagagatggaactttctacgatagtcgcattgaagctgaaaagggaatagataaaaatggcaggtgggtttctaaattaccagttgatgccgatgcaaatggagcttatcatattgcacttaaaggattatatcttttggaaaacaattttaatcgaaacgaaaaaggagttatccaaaatatttctaatgtagaatggttcaagtttgcacagacaaaataa

SEQ ID NO: 365 - DNA, 3882 bp, unidentified
  source 1..3882: mol_type = other DNA
atggctagaataattgatgagttttgtggacagatgaatgggtattctcgttcaattactttgaggaataggttagttcctattgggaaaactgaagaaaatttaaagcagtttttagaaaaagatttggaaagagcaactgcttatccggacataaaaaatcttatagatgctattcatcgtaatgtaattgaggatactttatccaaagttgctttgaattggaatgaaatattcaatatacttgctacttaccaaaatgaaaaagataaaaaaaagaaagcagcaataaaaaaggatttagagaaattacaaagtggtgcaagaaaaaaaatagttgaggcttttaaaaagaatcctgattttgaaaaattgtttaaggaaggattgttcaaagaacttttacccgaattaatcaaatctgctcccgttgacgaaatagcagtcaaaacaaaagctttggagtgttttaatagatttagtacatattttacaggctttcatgacaacagaaaaaatatgtatagtgaagaggcaaagtctacggcaataagttatcgtatcgtaaatgaaaatttcccaaaattttttgcaaatataaaactgttcaattatttaaaagagcattttccaagaataattattgatacagaggaatctttaaaagattacctcaaaggtaaaaaacttgactctgtgttcagtattgatggttttaacagtgtactggctcaaagtggaattgatttttataacacagtaattggtggaatttctggtgaagcaggaacaaaaaaaactcagggattgaatgaaaaaatcaatcttgcaagacaacaattgtcgaaagaagaaaaaaataaacttcgtggtaaaatggttgtcttgtttaaacagattttaagtgatagagaaacctcttcttttattccagttggttttgcaaataaagaggaggtttattcaactgttaaggaatttaataactcaattgctgaaaaggctgtttcaaaagtaagagacttattcttacacagagaagaatttactcttaatgaaatcttcgttcctgcaaagtcattgacagatttttctcaagcgatttttgggtcttggtcaatactttctgaaggtctgttcttgctggaaaaagatagcatgaaaaaggctttatctgagagtcaagaagaaaaaatcaataaggaaattgcgaaaaaagattgttcttttacagaattgcagttggcttatgaaagatattgtactgaacataatctacctgtagagaaattttgcaaggattattttgacattgtagattatcgtggaaatggtgcaaaatcagaaaagacaaaagtttctattctttctgaaattttggagacatttttgcaacttgattttgaccatattcaggatttacaacaagaaaaaaatgcggcaattcctataaaagcctatttagatgaagtacagaatctatatcaccatttgaaattggtagattatcgtggtgaggaacaaaaggattcaactttttattctaaacatgatgagattttgactgatctttcgcaaatcgttcccctttataataaagttagaaactttgttaccaagaaacttggagaaagtaaaaagataaaacttaattttgattgtccaactttagcaaatggctgggatgaaaaccaagagtcttctaatgatgccattatcttgagaaaagatgggaaatattatcttggaatttataatccaaataacaagccaaaatttgctaagaaagatagcattgttggtgattgttatgaaaaaatggcttataaacaaatagcacttccaatgggattaggtgcattcgtaaggaaatgttttggtaccgctcaaaagtatggctggggttgtccagaaaattgcttaaattctgaaggaaaaattataatcaaagatgaggaagcaaaaggaaatttagaggcaattatcgattgttataaagacttcttaaataaatatgaaaaagatggttttaaatacaaagattacaatttcagctttttagattctgcttcttatgaaaaattatctgacttttttaacgatgtaaaacctcaaggttataaactctccttcacaagtattccattatcagaaattgataaaatgatagatgaaggcaagctcttccttttccagatttacaacaaggactttgcgaagaaagcgacagggaagaaaaatcttcataccttgtactgggagaatctttttagtgttgagaacttgcaggatgtggtcttgaaattgaatggcgaggcggaactcttttggagggaggcaagcatcaaaaaggataaggtcattgtccacaagaaaggttctattctggtgaataggacgactacagacggaaaatctattccagaggccatctatcaggaaatttatcaacttaagaacaagatggctgactccatttctgatgaagccaaaaggttgttggagtcaggaactgtcgtttgtaaggttgccacccatgatatcgtgaaggacaagcacttcacagagaatacctatctgttccactgtcctattaccatgaatttcaaggcgaaggatagaacaaataaggaatttaataatcatgtcttggaggttctcaataagaatccagacataaaagtcattggcttggatcgtggagagcgtcatttgctctatctttctttgatcaaccaaaaaggtgagattgaatgccagaaaacactgaatttggtggagcaagtgaggaatgacaagactgtctctgtaaactaccatgaaaagctggtccacaaagagggtagtcgtgatgcagcacgaaagaattggcaaacgattgggaatataaaggaattgaaggaggggtatctttccgctgtagtccatgagattgccagcttgatggtgaagcataatgcaatcgttgttatggaggatttaaacttcgggttcaagcggggacgttttgcagttgagcgtcagatttatcagaagtttgagaatatgctgatagaaaagctgaattatcttgttttcaaagataggaaggtcactgagccgggcggagtattgaatgcctatcaattggcgaataagtctgcaaaggtgacggacgtttacaagcaatgtggatggcttttctacatccccgcagcctacacctccaagattgaccctcggactggatttgccaatctttttatcacaaaggggctgacaaatgtggaaaagaagaaggaattctttggaaagtttgattcaatcagatatgatgccacggagtcatgctttgtctttagctttgattacgcaaaaatctgtgacaatgcagactacaagaaaaaatgggatgtgtacacgaggggaacccggcttgtgtacaataaaactgaacggaagaatgtttctgtcaatcccacagaagagttgcagtgtgtatttgatgaatttggaatcaagtggaatactggagaggacttgattgaatccatcagtttgattccggcagaaaagtcgaatgcaaaattctttgacgttctgttgaggatgttcaatgccacactgcaaatgaggaattctgtgccgaatacggacactgactacttggtttctcctgtgaaagcggaggacggttctttctttgattctcgtgaggagtttaagaaaggtggagatgcaaggcttcccattgactgtgatgccaatggagcgtatcacattgcgttgaagggtctgtatttgctgttgaatgacttcaatcgggataacaagggagtgattcagaatatctccaacaaggattggttcaagtttgtacaggagaaagtatacaaggactga

SEQ ID NO: 366 - DNA, 3924 bp, unidentified
  source 1..3924: mol_type = other DNA
atggcaacgattgagaatttttgtggacaagagaatgggtattctcggtcaattactttaagaaataagttgattcctattggaaaaacagcgaacaacttaaaacaatttttggaaaaggatcaagaaagagctgatgtttatcctgaaattaaaaagttaattgatgaaatacatagaggctttattgaagatactctttctaagttttcatttgtatgggaacctttatttgatgattttgaattatatcaaaatgaaaaggataaatctaaaaaagccacaaagaaaaaagatttagagaaatttcaaagtggagcaagaaaaaaaattgtggaagcgtttaagaagcatccagactatgacaaactttttaaagatggattatttaaggaattattaccagctttgataaaaaattcttctgattctgaaatatcaaataaagaagaagcattaaaagtttttgatagatttagtacatattttgttggttttcacgaaaatagaaaaaatatgtatagcgaagaagacaaatctactgcaataagctatagaatagttaatgaaaactttccaaaattctatgccaatgtaaaattgtacaattatataaaagaaaatttcccaaaaattatttctgagacagaggaatctttaaagaatcatttgaacggaaaaagacttgatgagatttttaatgcagaatcttttaatgatgtattagcacaaagtggaattgacttctataacactgttattggtggtatttctacagaaacagaaaaagttcaaggtttgaatgaaaaaataaatcttgcaagacaaaaacttcccgcagaagaaaaaaataaactacggggtaaaatggtagttttgtttaagcagattttaagtgatagaggaacatcatcttttattcctgttggttttaacaacaaggaagaagtctattcttctgtaaaatcattcaatgatgaatttgtaaatatttctgtttgtgaaacaaaagaattattcaaacaagttgcagagtttaatcttagtgaaatttatgttccagcaaaatctttaacaaacttttcgcaaaatatttttggttcttggtcaattctaacagaaggacttttcttattagaaaaagataaagtgaaaaaagcattatcagaaaataaagaagaaaaaatcaacaaagagattgcaaaaaaagattattctttggatgagttacaagttgcttatgaaagatattgtaatgaacataatttttcagtagagaaaaattgcaaagattattttgatgttgttgattatcgatcagaaaatgaaaaatctgataagaaaaaaatttctatactttcagctattacagaatcttattcaaaaatagattttgaaaatattcatgatttacaacaagaaaaagaagccgctacaccaattaaaacatatttggatgaagttcagaatttatatcatcatctaaaacttgttgattatcgtggggaagaacaaaaagattcaaacttttattcaaaattggatgaaatcattactcagctttcagaaattattcctttatacaataaagttagaaactttgttacaaagaaacctggtgaaatgaagaagataaaattgaattttgattgtcctactctagctaatggatgggatgaaaataaagaatcttcaaatgatgcaataattttaagaaaggatggtaaatattatttaggaatttttaatccaaataataaaccaaaattttctaaaatcgaaaacatttctgaatcatactacgaaaaaatggtgtataaacttttaccaggcccaaacaagatgttaccaaaagtctttttttcaacaaaaggacaagaaacatttttgccaccaaaagatttgctcttaggatatgatgcaggtaaacataaaaaaggtgatgcttttgataaagaatttatgtataaattaattgattggtttaaagatgcaattaatcgtcatgaagattggaaaaaatttaattttgtattctctcctacaaaatcttacgaagatatgagtggtttttatagggaagttgaattacaagggtataaagtttcttttcaaaaaatatctgacacagaaataaattcttttgtaagcaacggaaaacttttccttttccaaatatacaataaagactttgctttaaaagcttctggaaagaaaaatcttcatacactttattgggaaaatctttttagtgaagaaaacttaaaagatgtttgtctaaaattaaatggagaagcagaattattctggagaaaaccaagtttgaacaaagaaaaagttactgttcacgaaaaaggttcaattcttgtaaataggacaacaaatgacggaaagtcaattccagaagacatttatcaagaaatttatcaattcaaaaataaaatgaaagataaaatttctgacaatatttctatacagaatgatgatggtaaagtcattacgattacagtaactttggaaaataagcaaaaagaaaaattcacagaaaattataaagttgtatataaaactgcaactcactatattacaaaggataatcgttttacagaagacacttatcttttccattgtcctattacaatgaactttaaggcacctgataaatcaaataaagaatttaataatcatgttcttgaagtattgagtggtaatcctaatgtaaaaattattggattggatcgaggcgaaagacaccttatttatctttcattgataaatcaaaaaggtgaaattgaacttcaaaaaacattaaatcttgttgaacaagttagaaatgataaaactgtaaaagtaaattatcaagaaaaacttgtacacaaagaagatgatagagataaggctcgtaaaagctggcaaacaattggaaatatcaaagaattaaaagaaggctatctttcaaatgttgttcatgaaattgcaaaaatgatggttgaacataacgcaattgttgttatggaagatttgaattttggatttaagcgggggcgttttgctgtagaaagacagatttatcaaaaatttgaaaatatgttaattgaaaaactaaattatcttgttttcaaagataaaaaggtaacagagcctggtggtgttcttaatgcttatcaattaacaaataaatctgcaaatgtatctgatgtctacagacaatgtggatggcttttctatattcctgctgcttatacttcaaagattgatccaaaaactggttttgcaaatctttttattacaaaaggcttaacaaacgtagaaaagaaaaaagaattttttgataagttagattctattcgttatgactcaaaagaagattgttttgtttttggatttgattatggaaaaatctgtgataatgctgattttaagaaaaagtgggaagtttatacaaaaggggaacgacttgtttacaataaaactgaacgcaagaatattaacataaatccaacagaagaattgaagtcaatctttgatgactttggaataaattggaataatgaagaaaattttattgattctgtccatacaatccaagctgaaaaatcaaatgcaaaattctttgatacacttttaagaatgtttaatgcaactttgcaaatgagaaattctattccaaacacggaaattgactacttaatttctcctgtaaaatcagaagatggaactttctttgattctagagaagaattgaaaaaaggtgaaaacgcaaaattaccaattgatgcagatgcaaacggagcttatcacattgcattaaaaggtttgtatttgttggaaaatgactttaaccgtaatgataaaggtgtaattcaaaacatctccaacgccgattggtttaagtttgttcaggagaaagaatatagggattaa

SEQ ID NO: 367 - DNA, 3897 bp, unidentified
  source 1..3897: mol_type = other DNA
atgacaactattaacaaattttgcggacaggggaatgggtattctcgagcaattactttaagaaataagttgattcctattgaaaaaacagcggacaacttaaaacaatttttggaaaaggatcaagaaagagctgattcttatcctgaaattaaaaagttgattgatgaagtgcatcggggatttatcgaggatactcttacaaaattctcatttgtatgggaacctttatttgatgattttgaattatatcaaaatgaaaaggataaatctaaaaaagctgcgaagaaaaaagatttagagaaatttcaaagtggagcaagaaaaaaaattgttgaagcttttaagaagcatcctgattatgacaaacttttcaaagatggattgtttaaggaattattaccagctttgataaaaaattcttctgactctgaaatatcaaataaagaagaagcattaaaagtttttgatagatttagtacatattttgttgggtttcacgaaaatagaaaaaatatgtatagcgaagaagaaaaatttactgcaataagctatagaatagttaatgaaaactttccaaaattctatgccaatgtaaaattgtacaattatttaaaagaaaatttcccacaaattatttctgagacagaggaatctttaaagaatcatttgaatgaaaaaaaacttgatgagatttttaatgtagaatcttttaatgatgtattagcacaaagtggaattgacttctataacactgttattggtggaatttctacagaaacagaaaaagttcaaggtttgaatgaaaaaataaatcttgcaagacaaaaacttcccgcagaagaaaaaaataaactacgggggaaaatggtagttttgtttaagcagattttaagtgatagaggaacatcatcttttattcttgttgattttaacaacaaggaagaagtttattcttctgtaaaatcattcaatgatgaatttgtaaatctttctgtctgtgaaacaaaagaattattcaaacaagttgcagagtttaatcttagtgaaatttatgttccggcaaaatctttaacaaacttttcgcaaaacatttttggttcttggtcaattttaacagaaggacttttcttattagaaaaagataaaatgaaaaaagcattatcagaaaatcaagaagaaaaaataaataaagagattgcaaaaaaagattattctttggatgagttacaggttgcttatgaaagatattgtaatgaacataatttttcagtagagaaaaattgcaaagattattttgatgttgttgattatcgatcagaaaatgaaaaatctgataagaaaaaagtttctatactttcagctattacagaatcttattcaaaaatcgattttgaaaatattcacgatttacaacaagaaaaagaagccgctacaccaattaaaacatatttggatgaagttcagaatttatatcatcatctaaaacttgttgattatcgtggtgaagaacaaaaagattcaaacttctattcaaagttggatgaaatcattactcagctttcagagattattcctttatacaataaagttagaaactttgttacaaagaaacctggtgaaatgaagaagataaaaatgatgtttgattgtagttctttattaggaggatggggaactgattatggaacaaaagaagctcatatttttattgattctggaaaatattatttgggaattataaacgaaaaattatcaaaagatgatgtagagttattaaaaaaatcaagtgaaagaatggtaacaaaagttatttatgattttcagaaacctgataataaaaatacacctcggttatttattcgttcaaaaggaacaaattatgcccctgctgtttctcaatataatttgccaatagaatctattattgatatttatgatagaggattgtttaaaaccgaatatagaaaaatcaatccagaagtttacaaagaatcattaataaaaatgattgactatttcaagttaggatttgaaagacatgaatcatataagcattatccattctgttggaaggaatcttcaaaatataatgatattggagaattttataaggatgtaataaattcatgctatcaattacattttgaaaaagtgaattatgataatttattaaaattggttgaaaataataaaatatttcttttccaaatctataacaaagattttgcagaaaaaaaatctggaaagaaaaatcttcatacactttattgggaaaatctttttagtgaagaaaacttaaaagatgtttgtctaaaattaaatggagaagcagaactattctggcgaaaaccaagtttaaacaaagaaaaagttactgttcacaaaaaaggttcaatccttgtaaatagaacaacaaatgatggaaaatcaattccagaagatatttatcaagaaatttatcaattcaaaaataaaatgattgataatctttcagagaacgcaaaatcattgttagattctggagttgttgtttgtaaagaagcaactcataatattacaaaggataatcgctttacagaagatacttatcttttccattgtcctattacaatgaactttaaggctcctgataaatcaaataaagaatttaataatcaagttcttgaagtattgagtgataatcctgatgtaaaaattattggattagatcgtggagaacgacaccttatttatctttcattgataaatcaaaaaggtgaaattgaacttcaaaaaacattgaatcttgttgatcaagttagaaatgataaaactgtaaaagttaattatcaagaaaaacttgtacacaaagaaggtgacagagacaaggctcgtaaaaactggcaaacaattggaaatatcaaagaattaaaagaaggatatctttcaaatgttgttcatgaaattgcaaaaatgatggttgaacataacgcaattgttgttatggaagatttgaattttggatttaagcgggggcgttttgctgtagaaagacagatttatcaaaaatttgaaaatatgttaattgaaaaactaaattatcttgttttcaaagataaaaaggtaacagagcctggtggggttcttaatgcttatcaattaacaaataaatctgcaaatgtatctgatgtctacagacaatgtggatggcttttctatattcctgcagcttatacttcaaagattgacccaaaaactggttttgcaaatctttttattacaaaaggcttaacaaacgtagaaaagaaaaaagaattctttgacaagtttgattctattcgttatgactcaaaagaagattgtttcgtctttggatttgattatggaaaaatctgtgataatgctgattttaagaaaaagtgggaagtttatacaaaaggtgaacgacttgtttacaataaaacagaacgcaagaatattagcataaatccaacagaagaattgaagtcaatctttgatgactttggaataaattggaataatgaagataattttattgattctgtccatacaatccaagctgaaaaatcaaatgcaaaattttttgatacacttttaagaatgtttaatgcaactttacaaatgagaaattctattccaaacacagaaattgactacttaatttcaccagtaaaatcagaagacgggactttctttgattctagagaagaattgaaaaaaggtgaaaatgcaaaattgccaattgatgcagatgcaaacggagcttatcacattgcattaaaaggcttgtatttgttggaaaatgactttaaccgtaatgataaaggtgtaattcaaaacatttctaacgccgattggtttaagtttgttcaggggaaagaatatgaaaaatga

SEQ ID NO: 368 - protein, 1321 aa, unidentified
MKMSEQFCGQGNGYSISKTLRFELKPQGATLENIKKLKLIESDLQKSQDYKDVKIIIDNYHKYFIDEVLQNVNLDWTKLADALIEYSKTKEDDSNVIKEQDALRNEIVKLISKDERFKPLTAPTPKDLFNSLLPEWFEKNASSALNEKAVETFKKFCAYFKGFQENRKNMYKEEAIPTAVPYRIVHDNFPKFLQNVASFAEIQKKCPEIIEQTETELSAYLENEKLSDIFNVKNYNKYLCQTGAEKQRGIDFYNQVIGGIVQNENDKKLRGLNEFLNLYWQKHADFAKTNRKVKFIPLYKQILSDRTSLSFKIQTIGSDQELKEAILSFAEKMNSKNNDGKTVFDVATELCETITQFDLSQIYVNQKDINNVSRILTGDWAYLQKRMNIFAEETLNKKEQKRWKKELDDDTSKTKGIFSFEELNAVLEYSSENCSPTTIRMQDYFGTTSRWYFDKQTEIFTKSGEIIEPSIKDLCAEIENNFIAMDKIFETVPSEKTLREKPADVEKIKNYLDSVQNLLHRIKPLKVNGLGDANFYTAYDEVYXALGEVXSLYNKTRNYIAKKVGAPEKFKLNFDNPTLADGWDQNKESSNTSIILIKDDKYFLGIMNAHDKPQFQEKXESNGEKCYQKMIYKLLXGPXKMLPKVFXXKKGISNFNPPKNILAGYDEXKHIKGDKFDIXXCHQLIDWXKDAISRHDDWKKFGFSFXATDSYKDXSDFYREVSXQGYKINXVXIPESXIDEMVXXXKLYLFQIYNXDFAEGASGTLNMHTLYWKNLFSKENLQDTVLKLNXEXELXYREKGINDPIVHKKGSKLVNKVTQDXFSIXTEIYTEIYKFENGKQDKLSDEARKYFDEHKVIVKTAGXDITKDRRFTEPXFLFHVPITINFKAQGNTFAMNEXVRKFLKNNPDVNIIGLDRGERHLIYLSLVNQNGEILKQFXFXEVGRXKNGQLVKVNYHEKLDNREKERDAARKNWNXIGKIAELKEGYLSAVIHELAKLMIQYNAVIVMEDLNFGFKXGRFHVEKQVYQKFEHMLIDXLNYXXFXDKXFSEXGGVLNGYQLAGQFESXQKXGKQSXFLFXVXAAXTXKIDPKTGFADLLNLRDLXNVHKKRDFFSKFDXXXYXAETXSFAFXFDYKXFDGKGXSEMSATKWTVYSREKRIVYSPKSKSHSDVYPTXELKKIFXXXSIDFESGNNXIDSIMEXGAXLKQNEKPTXDVANFWDAMLRNFKLILQMRNXXXASGEDYXISPXKNXDGXFFDSRKEKXLGDKAKLXXDADANGAYHIALKGLLLLKRFXKTEESNXXKXXXXISXAXWFEFAQNRNN

SEQ ID NO: 369 - protein, 1287 aa, unidentified
LESDKKKSEDYKDAKKIIDNYHCYFIDDVLKTLSLNWENLAKEINEYRKSKSDDVNLLSAQQKQRDEILKVFNSDKRFKALIASTPKDLFNKLLPEWFKKDNSVELNKEATETFKRFYSYFKGFQENRENVYSSKEIPTAVPYRIVNDNFPKFLSNISVFETIQKKCPDVITDVENELKEYLGNEKLSDIFSIQSFNKYLCQSGAENQRGIDFYNQIIGGIVEKDKEQNLRGINQFLNLYWQQHPEFAKNNKRIKMVPLFKQILSDRTSLSFKIEAIDSDDELIQAIEDCANKLEEKSKDDGKSIFEKCCELFDSINEQDLNEIYINRKDINNFSRILTGDWAWLQARMNYYAEEKFTTKAEKSRWVKSLEDEGENKSKGFYTLAELNDVLKYSSDNIPETNIRIADYFGRRYRYFYEKETGNYIPSEELVALSIEEMCDDILVKRKNMDKAFETSEKEKLQEDSETVSKIKDYLDSLQELLHRVKPLKVNGVGESSFYANFDTVYNALKEVISVYNKTRNYLTKKVASPEKYKLNFDNPTLADGWDLNKEQANTSVLFRKNGMFYIGIMNPKDKPKFAEKYEVKDEDFYEKMVYKLLPGPNKMLPKVFFSTKGKETFNPPKEILNDYEKGKHKKGDSFDIDFCHKLIDWFKNAINQHEDWKKFDFKFSDTKNYKDISDFYREVTEQGYKLSFTNIPVSEIEKMVEDGKLYLFQIYNKDFSSESKGTPNMHTLYWKNLFSEENLKDVCLKLNGEAELFYRPVGIKNPIVHKKDSYLVNKLTKDGKSIPENIYEEIYKNANGKLDKLSKDAEEYKRTHDVVIKVAKHDIIKDKHYTVPKFLFHVPITINFKASGNSYSLNENVRKFLKNNPDVNIIGLDRGERHLIYLSLINQKGEILEQFSFNTVEQSRNDAEPRIIDYHEKLNQREKERDEARKSWQTIGKIAELKEGYLSAVIHKLAQLMIKHNAIVVMEDLNFGFKRGRFHVEKQVYQKFEHMLIDKLNYLVFKDKGLTEAGGVLNGYQLASQFESFQKLGKQSGMLFYVPAGYTSKIDPKTGFVNMFNFKDLTNVHKKRDFFSNFKSISFDNDTDSFVFTFDYKDFNGKAKEEMFISKWSVYSREKRIVYYSKTKSYEDVLITEKLKSAFQKVNIDYTNGNDLLDSIMGIGADLKNGEKPSKEVADFWDTLLYNFKLILQMRNSNARTEEDYIISPVKAPDGTFFDSREEGKKEHNATLPKDADANGAYHIALKGLSLLKRFDVADEKSLKKFDMKISNADWFKFVQEKEYKD

SEQ ID NO: 370 - protein, 1369 aa, unidentified
MEKTMDDFTNLYSLSKTLRFELKPIAETKENIEKGKFLESDKKKAADYKAVKKIIDNYHKYFIDDVLKNASFTWTKLEEAIKEYNKNRNDDSVVENEQKKLREEILKLFTSDKRYKALTAATPKDLFDTILPEWFGENSNPDLNKTALKTFQKFTSYFTGFQENRKNVYSAEPIPTAVPYRIVNDNFPKFLQNISIFKTIQEKCPQVIDDVEKELSSYLGKEKLADIFTLESFNKYLGQGGKENQRGIDFYNQIIGGIAEKEGEQNLRGINQFLNLYWQQNPEFAKENRRIKMVPLYKQILSDRSSLSFKIESIENDEELKIALLECADKLEGKNEEKKSVFEDTCDLFESLKNQNLQEIYINRKDIKTVSRILTGDWSWLQTRMNVYAEEKFTTKAEKARWQKSLDDEGENKSKGFYSLAELNKVLEYSSENVTETDIRITDYFEHRCRYYIEKESERFVQGSELIALSIKEMCDDIQTKRKGMDRVLENLSDEKLLKEKTEDIAVIKNYLVAVQNLLHRIKPLKVNGVGDSSFYAIYDSIYSALSEVISVYNKTRNYITKKAASPEKYKLNFDNPTLADGWDLNKEQANTSVLLRKDGMYYLGIMNPKNKPKFAEKYEVADGQSCYEKMIYKQFDATKQIPKCSTQKKEVQKYFLSGATEPYILNDKKSFKSELIITKDIWFMNNHVWNGEKFVPKRDNETRPKKFQIGYFKQTGDFDGYKNALSKWISFCKEFLQSYISSTVYDYNFKKSDEYEGLDDFYNYLNATCYKLTFINIPESEIEKMVSEGKLYLFQIYNKDFAPGANGRPNMHTLYWKNLFSDENLKNVCLKLNGEAELFYRPAGIKDPVVHKEGSYLVNRTTEDGESIPEKIYLEIYKNANGKLDSLSDEAKSYKENHKIVIKKASHEIIKDRHYTEAKFLFHVPITINFKASGNSFSINENVRRFLKNNPDVNIIGLDRGERHLIYLSLINQKGEILKQFTFNEVERDKNGQTVKVNYHEKLDQREKERDSARKSWQTVGKIAELKEGYLSAVIHQLTKLMVEYNAIVVMEDLNFGFKRGRFHVEKQVYQKFEHMLIDKLNYLVFKDRGLNEPSGVLNGYQLTGQFESFQKLGKQSGMLFYVPAGYTSKIDPKTGFVSMMNFKDLTNVHKKRNFFSNFNDIHFDDATGSFVFTFDYKNYDGKAKEEMKQTKWSVYSRDKRIVYFPKVKSYEDIQPTEKLKALFETAGIDYKSGNPILDSIMTIGADLKEGAKPSKEIAEFWDGLLYNFKLILQMRNSNARTGEDYIISPVMADTGTFFDSREELKKGEDAKLPLDADANGAYHIALKGLELINKINLTDENELKKMKISISNADWFQFAQEKNYAKG

SEQ ID NO: 371-372 - skipped (2 entries)

SEQ ID NO: 373 - DNA, 4110 bp, unidentified
  source 1..4110: mol_type = other DNA
atggagaagaccatggatgatttcactaacttatacagcctcagcaaaactctccgcttcgaattgaagcctattgctgaaaccaaggaaaatatcgagaaaggaaagtttctcgagtctgataaaaaaaaggccgccgactataaagccgtcaagaaaatcatagacaactaccataagtacttcattgatgatgttctcaagaatgcctcctttacttggaccaagctggaggaagctatcaaggagtacaacaaaaatcgcaacgacgactccgtggttgaaaatgagcagaaaaaactgagagaggagatacttaagctcttcacctccgacaagagatataaggcgttaacagctgcaactcccaaggatctgtttgacaccattttgccggaatggttcggcgagaactctaatcctgacctgaacaaaactgccctgaagacgttccaaaaattcacgagttattttacagggtttcaagaaaaccgcaaaaacgtgtatagcgcagagcccattccaactgcggtgccgtataggattgtgaacgacaattttcctaagttcctgcagaacatcagtatttttaaaaccatccaggagaaatgcccacaggtgatcgacgatgtagaaaaagagctctcaagctatctcggtaaagaaaagcttgccgatatcttcactctggaaagctttaataagtacctgggccagggcggaaaggagaaccagcgtgggatcgatttctacaatcagatcatcggtggaatcgcggagaaggaaggagaacaaaatcttcgcggcattaatcagttccttaatctgtattggcagcagaatcctgagttcgccaaagagaataggcgtattaaaatggtgcccctgtacaagcaaatattgtctgaccggtcaagcctctctttcaagatagagagcatagaaaacgatgaagagctgaagattgctctgctagagtgtgctgacaaactagaaggaaagaacgaggaaaagaagtcagtttttgaagacacctgcgacttattcgagagcctcaagaatcaaaatctacaggagatctacatcaatcggaaagatatcaaaaccgtcagtcgcattctgacaggggattggtcttggttgcagacccgaatgaacgtttacgcagaagagaagtttacaactaaagccgaaaaagcccgctggcagaaaagccttgatgacgaaggagagaataagtctaaaggattctactcactcgctgaattaaacaaggtcttggaatatagctcagaaaatgtgacggaaaccgatattcgcatcactgactacttcgagcataggtgtagatattacattgagaaagagtcagaacggttcgtccagggctcggaactgatcgctctgtccattaaggagatgtgtgatgatatccagacgaagagaaagggaatggatagagtgctggagaacctaagtgatgagaaactgttgaaagaaaagaccgaagacattgccgtcattaagaactatctggtagcagtgcaaaatctcctgcatcggatcaagccacttaaagtgaacggtgtcggagattcttccttctatgcaatatatgactcgatctattctgccctctcagaagtgatctctgtctacaataagacgaggaactacattaccaaaaaagccgcctcccctgagaagtacaagctaaattttgacaaccctacactcgctgatggatgggacctcaataaggaacaggcaaacacctccgtgttgctgcgcaaagacgggatgtattacctggggataatgaacccaaaaaacaagcctaagtttgcagagaagtatgaggtcgccgatgggcagtcctgttacgagaagatgatatataagcagtttgacgccacaaaacaaattcccaagtgcagcacccagaaaaaagaggtgcagaaatatttcctctctggcgcgaccgaaccatatattctgaacgacaagaaaagcttcaaaagcgagctaatcatcaccaaagatatctggttcatgaataaccatgtgtggaatggcgaaaaatttgttcctaagagggacaacgagactcggcccaagaagtttcagattggctatttcaagcagacaggcgattttgacggctacaaaaatgctctgtctaagtggattagcttttgcaaggagttcctacaatcctacatctctagtactgtgtacgactacaatttcaagaaaagcgacgagtacgaaggacttgacgacttttacaactaccttaatgctacgtgttataagctgacctttattaacattcccgagtccgagatcgagaaaatggtgtcagaggggaaattgtacttgttccagatctacaacaaggattttgcacctggagcaaacggtaggcctaatatgcacacactgtattggaaaaatctgttttcagacgagaatctgaagaatgtgtgcctcaagctgaatggagaagccgagttgttctatagacccgccggcatcaaggacccagtggtacataaagagggctcttatctggtcaaccgaactacagaggatggggagtcaatcccagaaaaaatctacctggagatatacaagaacgctaacggtaagctggacagtctcagtgatgaggccaagtcttacaaggagaaccataagatcgtgataaaaaaggcatcacacgagatcataaaggataggcactacactgaagcaaagtttctctttcacgttcctattaccattaacttcaaagcatcgggcaactccttctctataaacgagaatgttcgaaggttccttaaaaacaaccccgatgtgaatatcattgggctcgaccgtggcgaacggcatcttatatacctcagtctcattaaccagaagggggagatcctgaaacaatttacgtttaatgaggtagagagagataagaatggtcagacagtgaaggtgaattaccacgagaagctggatcagagagagaaagaacgtgactctgcccgcaaatcatggcaaacagtagggaagattgctgagcttaaggaggggtacctgtccgccgttatccaccagctgaccaagttaatggttgagtataatgccatcgttgtgatggaggatctgaacttcggatttaagaggggcagatttcatgtcgaaaagcaagtgtatcagaaattcgaacacatgctgatcgataagctgaactatctggtctttaaagatcggggccttaatgaaccaagtggggtgctaaacgggtaccaactgaccggtcaattcgaaagtttccagaaactgggcaaacagtcgggtatgttattctatgtccccgccggctatacaagcaaaattgacccaaaaaccgggttcgtatccatgatgaattttaaagacctgacaaatgtgcacaagaagcggaatttcttcagtaacttcaatgacattcactttgatgatgctacaggatcctttgtgttcacattcgactacaagaactacgacgggaaagccaaggaggagatgaagcagaccaagtggagcgtatattccagggataaacgaatcgtctacttccccaaagtcaagtcctatgaggatattcagccgaccgagaagttgaaagcgctttttgaaactgctggcatagactacaaatcaggaaaccccatattggatagcattatgactatcggcgccgacctcaaagaaggcgctaagccgtccaaggaaatcgctgaattctgggacggtcttttatataactttaagctgatcctgcagatgcggaatagtaacgctagaacaggtgaggactacatcataagtccagttatggctgacaccggtacattttttgatagccgagaggaattaaagaaaggcgaagacgccaaattgcccctggatgcagacgcgaacggagcataccacattgcgctgaaaggcttagaactcatcaacaagatcaacttgactgacgagaatgagcttaagaagatgaagatctccattagcaacgccgactggttccagtttgcccaggaaaagaattatgcaaaagggtga

SEQ ID NO: 374 - DNA, 36 bp, unidentified
  source 1..36: mol_type = other DNA
atctacaacagtagaaattttgtattggtttcaaac

SEQ ID NO: 375 - DNA, 35 bp, unidentified
  source 1..35: mol_type = other DNA
tctacaacagtagaaattttgtattggtttcaaac

SEQ ID NO: 376 - DNA, 36 bp, unidentified; identical to SEQ ID NO: 353
  source 1..36: mol_type = other DNA

SEQ ID NO: 377 - DNA, 35 bp, unidentified; identical to SEQ ID NO: 354
  source 1..35: mol_type = other DNA

SEQ ID NO: 378 - DNA, 36 bp, unidentified
  source 1..36: mol_type = other DNA
atctacaacagtagaaatttaatatgaagttcaaac

SEQ ID NO: 379 - DNA, 35 bp, unidentified
  source 1..35: mol_type = other DNA
tctacaacagtagaaatttaatatgaagttcaaac

SEQ ID NO: 380 - RNA, 36 nt, unidentified
  source 1..36: mol_type = other RNA
gtttgaaaccaatacaaaatttctactgttgtagat

SEQ ID NO: 381 - RNA, 36 nt, unidentified; identical to SEQ ID NO: 360
  source 1..36: mol_type = other RNA

SEQ ID NO: 382 - RNA, 36 nt, unidentified
  source 1..36: mol_type = other RNA
gtttgaacttcatattaaatttctactgttgtagat

SEQ ID NO: 383-385 - skipped (3 entries)

SEQ ID NO: 386 - protein, 1257 aa, unidentified
LRSKMAKNTIFSKFTELYPVSKTLRFELKPIGKTLEKIKENGIIDHDKNKADNYVDAKKIIDEYHKYFISEALKGINLDWSPLRDAFIDSLTNRTQDSKKKLEDLQKTFRKKIAEKLAAHPHFKELTATTPKDLFKNILPDHFGNDESIESFKGFSTYFKGFQENRQNIYSAEAISTGVPYRIVHDNFPKFLSNIETFQNIQKHCLSVLTDAETELKKLLNGQKLVEIFNIDFFNNVVTQEGIDFFNQIIGGYTIENNTKIRGINEFANLYRQQNPEFAKLRIATRMIPLYKQILSDRDSMSFILEPFKDASQVQSAVKDFFEDHILHYTTDGSQINVLDKIANLVASLNNFDSEKIFIARESLSQISQKIFGNWNSINDAFFEYCEKQFGSAQKTANKKKIDAKLKEDCYSIKEINCVIKKIDSSKQILDYWKEFDSLKNNIESGDIYKKYVDFISLKFEPDEKLEKDDNIQGLKAFLDAINEFLHYVKPLIVNHENGDTAFYNELMPLYDQLSNIIPLYNKTRDFATQKPSDSAKFKLNFENPTLADGWDQNNEAKNTSIILKKEGNYYLGIMNAKDKPKIDTYKVNSNEPHYDKMVYKLIPSPHMSLPKAFFSKKGLALYKPSMQILDGYNANKHKKGSSFDKKYCHQLIDFFKEAISAHPDWKNFKFNFSETASYDDTSAFYNEISNQGYMLSFTSIPDSQIDTWIDEGKLFLFQIYNKDFAPGAKGKPNLHTLYWKATFSPENLKDVVFKLNGEAELFYRPCSIKKPYSHKIGEKMVNRITKDGRPIPDAIFGELFHYFNNSTKPSLSDDAKKYLDFVIVKDVKHEITKDKRYTEDKFEFHVPLTMNFKSSDGSRYINDRVKDFLKNNPDVNIIGIDRGERNLIYMTLINQKGEILIQKSFNLVGNTNYHEKLSIREQERDAARRSWRSIGKIKELKEGYLSLVIHEIAKTMIENNAIIVLEDLNFGFKRGRFCVEKQVYQKFEKMLIDKLNYLVFKDCSDSEYGGILKGYQLTQKFTSFKDIRKQNGFLFYIPAAYTSKIDPTTGFVNLFNFTDLTNAEKKKDFLTNFDDITFDSKTNSFAFTFDYSKFKVFQTDFQKTWTVFTNGKRIVYDRESKKYNTIEPTTIIQEALEKQGVQCVDQLNVLAEIEKIETKNASFFNSICYAFEKSLQMRNSNSETDDDYILSPVKNKNGVFFNSNEADDKLPKDADANGAFHIALKGLYLLQHISETDEKLKIPHEKWFEFVQSRNK

SEQ ID NO: 387 - protein, 1275 aa, unidentified
LSLFVAKKGYIKKNTILRSKMAKNTIFSKFTGLYPVSKTLRFELKPIGQTLEKIKENGIIDHDKNKADNYVNAKKIIDEYHKYFISEALKGVKLDWSPLRDAFIDSLTNRTQDSKKKLEDLQKTFRKKIAEKLAAHPHFKELTASTPKELFEKILPNHFGKEESVEAFKRFSTYFKGFQENRKNIYSADAISTGVPYRIVHDNFPKFLSNIETFQNIQKHCPSVLTNAETELKELLNGQKLAEIFNIVFFNSIITQEGIDFFNQIIGGYTIENNKKIRGINEFTNLYRQQNPEFAKQRIATRMIPLYKQILSDRESMSFILEPFKDASQVQSAVKDFFEDHILHYSTDGSQINVLDKISNLITSLNNFEPDKIFIARESLSQISQKFFGSWNSINDAFFEYCEKQFGSAQKAANKKKIDAKLKEDCYSINEINHVIKQIDPSKQISDYWKELESFKNNIESGDLYKKYEDFISLKFEPDAKLEKDDNIQGLKDFLDAINEFLHYVKPLTANHENGDTAFYNELMPLFDQLSNVIPLYNKTRDFATQKPSDSAKFKLNFENPTLADGWDQNKEDANTSIILKKGENYYLGIMNAKDKPKIDTYKVTPDEPHYDKMVYKLLPGPNKMLPKVFFSAKGKEIYNPSKEIQDGYAAEKHKKGPSFDKRFCHQLIDFFKEGISNHPDWKNFNFNFSETSSYEDISAFYNEVSDQGYKLSFTPIPDSQIDTWIDEGKLFLFQIYNKDFAPGAKGKPNLHTLYWKATFSPDNLQDIVFKLNGEAELFYRPCSIKKPYSHKIGEKMVNRITKDGRPIPDAIFGEIFHYFNNSTKPSLSDDAKKYLDFVIVKDVKHEIIKDKRYTEDKFEFHVPLTINFKADDGSKRLNDQIKDFLKNNPDVNIIGIDRGERNLIYMTLINQKGEILIQKSFNLVGNTNYHEKLSIREQERDAARKSWRSIGKIKELKEGYLSLVIHEIAKTMIENNAIIVLEDLNFGFKRGRFCVEKQVYQKFEKMLIDKLNYLVFKDCSDSECGGILKGFQLTQKFESFQKMGKQNGFLFYVPAAYTSKIDPTTGFVNLFNFTDLTNAEKKKAFLTNFDDITYDSKTSTFALTFDYSKFKVFQTDYQKTWTIFTNGKRIVYDRESKTHNTIEPTTIIQEALEKQGIQCVDQLNVLTEIEKIEPTRENARFFDSICYAFEKTLQLRNSNSETGDDYILSPVKNKNGIFFNSNEADDKLPKDADANGAFHIALKGLYLLQHISETDEKLKIPHEKWFEFVQSRNK

SEQ ID NO: 388 - DNA, 3774 bp, unidentified
  source 1..3774: mol_type = other DNA
cttcgttcaaaaatggccaagaataccatcttcagtaagtttactgagttgtatcctgtgtcaaaaaccttgcgattcgaattaaaaccaatagggaagacactggaaaaaatcaaggagaacggaattatcgatcacgacaagaataaagcagacaattacgtggatgctaagaagatcatcgacgagtaccacaaatactttataagcgaggcccttaaagggatcaatctggattggtcgccattgcgggatgcctttattgattccctgactaacagaactcaagattcgaagaaaaagttagaggatctacaaaagacctttcgcaaaaagatcgctgaaaagttggcagcacacccacatttcaaggaactgactgccacaacacccaaggacctgtttaagaacattctgcctgaccatttcggcaacgacgaatcaatcgaaagctttaaaggcttttccacgtattttaagggtttccaagagaataggcagaatatatacagcgctgaggcaatatccaccggtgtgccttacagaatcgtgcatgacaacttcccaaaatttctcagcaatattgagacattccagaacatccaaaagcattgtctgtccgtgctgactgacgccgagactgagttgaagaagctgttaaatggccaaaagctggtggagatattcaacatcgatttcttcaacaatgtcgtcacgcaggaaggtattgatttcttcaatcaaatcatcgggggttacacgattgaaaacaacaccaaaattaggggaatcaacgagttcgccaatctgtaccggcagcaaaacccagagtttgccaagttgcgcattgccaccagaatgatccccctgtataagcaaattctttcggatcgcgattctatgagttttatactcgagcctttcaaagacgcaagccaggtgcagtctgccgtcaaagactttttcgaagatcatatccttcactatacaacagatggctctcagatcaatgtgctagacaagattgctaacctcgtggctagtttgaacaatttcgactcagaaaagatcttcatagctagggagtcactgagccagatctctcagaagatctttggcaattggaattcaattaacgatgcgtttttcgagtattgcgaaaagcagtttggatctgcccaaaaaactgcaaacaagaaaaagatcgacgccaagctcaaggaggattgctacagtatcaaggagatcaattgcgtgattaagaagatcgacagctcaaaacagattttagactactggaaagagtttgactctttaaagaacaacatcgagtccggggacatttacaagaagtatgtcgacttcatttcactgaagtttgagcccgatgagaaattggagaaagacgacaatattcaggggctcaaggctttcctggatgccattaatgagtttcttcactatgtgaaaccgctcattgtcaaccatgaaaatggcgatactgcattctataacgagctaatgcctctgtacgaccagctgtctaatatcattccgttgtacaacaaaacacgcgatttcgcgacccagaagccttctgattccgcgaagttcaaactgaatttcgaaaatccaaccctagccgacggctgggatcagaacaatgaagcgaagaacactagcatcattttgaagaaggagggcaactattatctcggcatcatgaacgctaaagacaaacccaagattgacacatataaagtaaacagcaacgaaccacactatgacaagatggtatacaaactgattcccagcccccacatgtccttgcccaaggccttctttagtaagaaaggacttgccctctataaacctagtatgcagatcttagacggttataatgccaataaacataagaagggatctagcttcgacaaaaaatactgccaccagctcatcgatttctttaaagaggccatctccgctcaccccgactggaagaactttaaatttaacttcagcgagactgcatcgtacgatgatacctctgcattttacaacgagattagcaatcaggggtacatgctgagtttcacatctattcctgactcccagatagatacctggatcgacgaagggaagttattcctgtttcagatctacaacaaagattttgcaccaggcgctaaagggaaaccgaatctgcacaccctgtattggaaggcgacgtttagtcctgagaacctgaaagacgtcgtttttaaactgaacggcgaagctgagctcttctatcggccctgcagtataaaaaagccgtactcccacaaaatcggtgaaaagatggtcaataggataacaaaggatggacggccaattccggacgcgatctttggggaactgtttcattacttcaacaattcaacgaagccctctctgagcgacgatgccaagaaataccttgacttcgtaattgttaaggatgtgaagcatgagattacgaaagacaagcgctataccgaagataagtttgagtttcacgtccctctaacaatgaattttaaaagcagcgatgggtcaagatacatcaatgaccgtgtgaaagactttcttaagaataaccctgacgtgaatatcattggcatcgatcgaggcgagcgcaatcttatctatatgaccctcatcaatcagaaaggggagattcttatccagaagtccttcaacctcgttggcaacactaattaccacgaaaaattaagcatcagggagcaggaaagggatgctgcccgacggagctggcgaagtatcggcaaaattaaagaattgaaggaagggtatctgtcactcgtcatccacgaaatagctaaaacaatgatagagaacaacgccataattgttctcgaggatctgaatttcggatttaaacggggaaggttttgtgttgaaaaacaggtgtatcagaagttcgaaaaaatgctcatcgacaagctgaattacctagtgttcaaagactgttcagactctgaatatggtggtattctgaaaggctatcagctgacccagaagtttacctcctttaaggacattagaaagcaaaatggattcctcttctacatcccagctgcctatacgtccaaaattgatcccaccactggatttgtcaacctcttcaatttcaccgatctgactaatgcagagaagaagaaggattttctgaccaattttgacgatatcacctttgactctaagacaaattcttttgctttcactttcgattactccaagttcaaggtgttccaaaccgacttccagaagacatggacagttttcaccaatggaaagagaatagtgtatgaccgtgagtctaaaaagtacaacactatagaacccaccacaatcatacaggaagcgctcgagaagcagggggtgcaatgtgtagaccagctcaatgttcttgccgagattgagaaaatcgagacaaaaaacgcaagtttctttaactccatttgttacgcattcgaaaagtcccttcagatgagaaactccaacagcgaaaccgacgacgattacatattgagtcccgttaaaaacaagaacggcgtattctttaactccaacgaggccgatgataaactgccaaaagatgccgacgctaacggcgcctttcacattgcactaaaaggactgtacctgctgcagcatatatcagaaactgacgaaaaactgaagattcctcatgagaagtggttcgagttcgtgcagagccggaacaagtga

SEQ ID NO: 389 - skipped

SEQ ID NO: 390 - DNA, 36 bp, unidentified
  source 1..36: mol_type = other DNA
gcctagaaacttcaaaaaatttctactcttgtagat

SEQ ID NO: 391 - DNA, 35 bp, unidentified
  source 1..35: mol_type = other DNA
cctagaaacttcaaaaaatttctactcttgtagat

SEQ ID NO: 392 - DNA, 36 bp, unidentified
  source 1..36: mol_type = other DNA
gcctagaagcttcaaaaaatttctactcttgtagat

SEQ ID NO: 393 - DNA, 36 bp, unidentified; identical to SEQ ID NO: 392
  source 1..36: mol_type = other DNA

SEQ ID NO: 394 - RNA, 36 nt, unidentified
  source 1..36: mol_type = other RNA
gcctagaaacttcaaaaaatttctactcttgtagat

SEQ ID NO: 395 - RNA, 36 nt, unidentified
  source 1..36: mol_type = other RNA
gcctagaagcttcaaaaaatttctactcttgtagat

SEQ ID NO: 396 - protein, 1275 aa, unidentified
LSLFVAKKGYIKKNTILRSKMAKNTIFSKFTXLYPVSKTLRFELKPIGXTLEKIKENGIIDHDKNKADNYVBAKKIIDEYHKYFISEALKGXXLDWSPLRDAFIDSLTNRTQDSKKKLEDLQKTFRKKIAEKLAAHPHFKELTAXTPKXLFXXILPBHFGXXESXEXFKXFSTYFKGFQENRXNIYSAXAISTGVPYRIVHDNFPKFLSNIETFQNIQKHCXSVLTBAETELKXLLNGQKLXEIFNIXFFNXXXTQEGIDFFNQIIGGYTIENNXKIRGINEFXNLYRQQNPEFAKXRIATRMIPLYKQILSDRXSMSFILEPFKDASQVQSAVKDFFEDHILHYXTDGSQINVLDKIXNLXXSLNNFXXXKIFIARESLSQISQKXFGXWNSINDAFFEYCEKQFGSAQKXANKKKIDAKLKEDCYSIXEINXVIKXIDXSKQIXDYWKEXXSXKNNIESGDJYKKYXDFISLKFEPDXKLEKDDNIQGLKXFLDAINEFLHYVKPLXXNHENGDTAFYNELMPLXDQLSNXIPLYNKTRDFATQKPSDSAKFKLNFENPTLADGWDQNXEXXNTSIILKKXXNYYLGIMNAKDKPKIDTYKVXXBEPHYDKMVYKLJPXPXXXLPKXFFSXKGXXJYXPSXZIXDGYXAXKHKKGXSFDKXXCHQLIDFFKEXISXHPDWKNFXFNFSETXSYXDXSAFYNEXSBQGYXLSFTXIPDSQIDTWIDEGKLFLFQIYNKDFAPGAKGKPNLHTLYWKATFSPXNLXDXVFKLNGEAELFYRPCSIKKPYSHKIGEKMVNRITKDGRPIPDAIFGEJFHYFNNSTKPSLSDDAKKYLDFVIVKDVKHEIXKDKRYTEDKFEFHVPLTXNFKXXDGSXXJNDXXKDFLKNNPDVNIIGIDRGERNLIYMTLINQKGEILIQKSFNLVGNTNYHEKLSIREQERDAARXSWRSIGKIKELKEGYLSLVIHEIAKTMIENNAIIVLEDLNFGFKRGRFCVEKQVYQKFEKMLIDKLNYLVFKDCSDSEXGGILKGXQLTQKFXSFXXXXKQNGFLFYXPAAYTSKIDPTTGFVNLFNFTDLTNAEKKKXFLTNFDDITXDSKTXXFAXTFDYSKFKVFQTDXQKTWTXFTNGKRIVYDRESKXXNTIEPTTIIQEALEKQGXQCVDQLNVLXEIEKIEXXXXNAXFFBSICYAFEKXLQXRNSNSETXDDYILSPVKNKNGXFFNSNEADDKLPKDADANGAFHIALKGLYLLQHISETDEKLKIPHEKWFEFVQSRNK

SEQ ID NO: 397 - DNA, 3774 bp, unidentified
  source 1..3774: mol_type = other DNA
ttgaggtcaaaaatggctaaaaataccatattctccaagttcaccgaactttacccggtttctaaaaccctgcgctttgaattgaagcccattggcaaaacccttgaaaaaatcaaggaaaatggaattatcgaccatgataaaaacaaagccgataattatgttgatgcgaagaaaattatagatgagtaccataaatatttcatcagcgaagcattaaaaggaatcaacttagactggtcaccactccgtgacgcatttatagattcattgaccaacagaactcaagatagcaagaaaaaactcgaggatttgcagaagactttcagaaaaaaaattgccgaaaaacttgctgcacatccacactttaaggaactaacagccacaacgcctaaagatttgtttaaaaatattcttccggatcattttgggaacgacgaatctattgaatcttttaaaggattttctacttactttaagggtttccaagaaaacaggcagaacatctattctgcagaagcaataagcactggagtgccataccgaattgttcatgacaattttcctaaatttttatccaacattgaaactttccagaacattcaaaagcattgtctttctgttcttaccgacgccgaaacagaattaaaaaaactactaaacggccaaaaacttgttgaaatattcaatattgattttttcaacaatgttgtcacacaagaaggtatcgatttcttcaatcagataatcggcggctacacaattgaaaacaatactaaaattcgcggaatcaacgaatttgcaaatctctaccgtcaacaaaatcctgagttcgcaaaactgcgcatcgcaactagaatgattcccttgtacaagcaaatcttaagcgatcgggattcaatgtcgttcattctagaacctttcaaagacgcttctcaagtgcaatcggctgtaaaggacttttttgaggaccacattttgcattatactaccgatggctctcaaattaacgttctggacaaaattgccaatttggtcgccagtttaaacaattttgattcagaaaaaattttcattgctagagaatctctttcacaaatatctcaaaaaatctttggaaattggaattcgataaatgacgccttctttgaatattgcgagaaacaatttggctcagcacaaaaaactgctaataagaaaaaaattgatgcaaaattaaaggaagattgctattcaatcaaagaaataaactgtgtcatcaaaaaaatagactcttccaaacaaatattggactattggaaagagtttgatagtttgaaaaataatattgaatcgggtgacatttataagaaatacgtggattttatatctctcaaatttgaaccggatgagaaactggaaaaagatgacaatatacagggcttgaaggcatttctcgatgccattaacgaattccttcattatgtcaaacctttgattgttaatcacgaaaacggagatacggctttttacaacgaactaatgccgttatatgatcagttatctaatattattcctctatataacaaaacccgtgatttcgcaacgcagaagccatcagattcggcaaaatttaaactcaattttgaaaaccccactcttgcagatggctgggatcaaaacaacgaagccaaaaatacgtccataattcttaagaaagagggcaattattatttgggaataatgaatgccaaggacaaacctaaaattgacacatataaggttaactctaatgagcctcattatgacaaaatggtttacaaactcattccctctccacacatgtctcttcccaaggcatttttctcaaaaaaggggctggcgttatacaaaccctctatgcaaatattagatggttataacgcaaataagcataaaaaagggtcgtcttttgataagaaatattgccatcaattaattgatttcttcaaggaagctatttctgcacatcccgattggaaaaatttcaaattcaacttctcagaaacagcttcttatgatgacactagtgctttttataacgaaatttctaatcaaggatacatgctttcatttacttctattcccgattcacaaatcgatacatggattgatgaaggaaagttattcctgttccagatttacaataaggattttgctccaggagcaaaaggcaagcccaatttgcatacattatattggaaagcaacattctctcccgagaatttgaaagatgttgtatttaaattgaatggagaagcagaacttttctatcgtccttgcagcatcaagaaaccatactctcacaaaatcggtgaaaaaatggtgaaccgaataacaaaggacggcaggccaattcctgacgcgatatttggagaacttttccattatttcaacaattcgacaaagccttctttgagtgacgatgctaaaaaataccttgattttgtaatcgtcaaagatgtaaagcacgaaatcactaaagacaaacgatacaccgaagataaatttgaattccatgtgccattaaccatgaattttaaatcaagtgatggcagtagatacataaatgatcgcgtaaaggatttcctaaagaataatcctgacgtcaatatcattggaattgaccgtggtgaacgcaacctaatttatatgactcttatcaaccagaaaggtgaaattctgatacaaaagagttttaatctagtcggcaatacaaattatcatgaaaagctgtccattcgcgaacaggaacgtgatgccgcaaggaggagctggcgaagcatcgggaaaattaaggaactcaaagagggctacctcagccttgtcatccatgaaattgccaaaacaatgattgaaaacaacgcaattattgttcttgaagatttaaattttggatttaagcgtggacgattctgcgtcgaaaagcaagtatatcaaaagtttgagaaaatgctaattgacaagctcaattatcttgttttcaaagattgctcggattctgaatatggtggaattcttaaaggatatcagcttactcaaaaatttacgagtttcaaagacattagaaagcagaatggattccttttctatattcccgctgcttacacttctaaaatagatccaacaaccggtttcgtgaatcttttcaattttacagatttaacgaatgcggaaaagaaaaaggattttttgacaaattttgatgacattacttttgattctaaaacaaattcttttgcttttacttttgattacagcaaattcaaagtatttcaaactgatttccaaaagacatggacagtcttcaccaatgggaagagaatcgtctatgatcgagaatcaaagaaatataacacaattgagccgacaacgataatacaggaggctttggaaaagcaaggcgttcaatgtgttgatcaattaaatgtattggctgaaattgaaaaaatcgaaacaaaaaacgctagtttcttcaattctatatgttatgcttttgaaaaatcattgcaaatgagaaatagtaattctgaaactgatgacgactatatactttctccagtaaaaaacaagaatggagtattcttcaatagcaatgaagcagatgataaacttcctaaagatgcagatgcaaatggagctttccacatagctttgaaaggattgtatctgttgcagcatatatcagaaacagatgaaaaattaaagatacctcatgaaaagtggtttgaattcgtacagtctcggaataaataa

SEQ ID NO: 398 - DNA, 3828 bp, unidentified
  source 1..3828: mol_type = other DNA
ctgtcattatttgtcgcaaagaaaggttatattaaaaaaaacactattttgaggtcaaaaatggctaaaaataccatattctctaagttcaccggactttacccggtttctaaaaccctgcgctttgaattgaaacccataggccaaacccttgaaaaaatcaaggaaaatgggattattgaccatgataaaaacaaagccgataattatgtcaatgcgaagaaaattatagatgagtaccataaatattttatcagcgaagcgttaaaaggagtcaaattagactggtcaccactccgtgacgcatttatagattcattgaccaacagaactcaagatagcaagaaaaaactcgaggatttgcagaagacattcagaaaaaaaattgctgaaaagcttgctgcgcacccacactttaaggagctaacagcctcaacacccaaggaactatttgaaaagattcttccaaatcattttggaaaagaagaatctgttgaagcctttaaaagattctctacctattttaaaggattccaagaaaacaggaaaaacatctattctgccgatgcaataagtacaggagttccataccgaattgttcatgacaattttcccaagtttttatccaacattgaaactttccagaacattcagaaacattgtccttccgttcttaccaatgccgaaacagaattaaaagaactactaaacggacaaaaacttgcagaaatattcaatattgtttttttcaacagcattatcacgcaggaaggcatcgatttcttcaaccagataatcggtggatacacaatagaaaacaacaaaaaaattcgcggaatcaacgaatttacaaatctttatcgtcaacaaaatcctgaatttgcaaagcaacgaatcgcaacaagaatgattcccttatacaagcagattttaagcgatcgggaatcaatgtctttcattctagaaccctttaaagacgcatctcaagtacaatcggctgtaaaggacttttttgaggaccacattttgcattatagtaccgatggttcccaaattaacgttcttgacaaaatttccaatttgatcaccagtttaaataattttgaaccagataaaattttcattgctagagaatctctttcacaaatctctcaaaaatttttcggaagttggaattcgataaatgatgcattctttgaatattgcgagaaacaatttggctcagcacaaaaagcagccaataagaaaaaaattgatgcgaaattaaaggaagattgttattcgattaatgaaataaaccatgtcatcaagcaaatagacccatccaaacaaatatcggactattggaaagaattagaaagctttaaaaacaatattgaatcaggggacctttataagaaatatgaggattttatatctctcaaatttgaaccagatgcgaaactggaaaaagatgacaatatacaaggattgaaggatttcctcgatgccattaatgagttccttcattatgtcaagcctttaacagcaaatcacgaaaacggagacacggctttttacaacgaactaatgccattatttgatcagttatctaatgttattcctctatataacaaaactcgtgatttcgcaacgcagaagccatcagattcggcgaaatttaaactcaattttgaaaatccaactcttgcagatggctgggatcaaaacaaagaagacgcaaacacctcaataattctaaaaaaaggtgagaattattatttgggaataatgaacgccaaggataagcctaaaattgacacctataaggtcaccccggatgagcctcactatgacaaaatggtttataagcttcttcctggcccaaacaaaatgcttcctaaagttttcttctccgctaaaggaaaggaaatttacaatccatctaaagaaattcaagatggatatgccgcagaaaagcacaaaaaaggtccctcttttgacaaacggttctgtcatcagttgatagatttcttcaaggaaggcatttctaatcatccagactggaaaaatttcaactttaacttctcagaaacaagttcctatgaagacattagtgccttttataacgaagtttctgaccaaggttacaagctttcgttcactcctattcccgattcacaaatcgatacatggattgacgaaggaaaactgttcctgttccagatttataataaggatttcgcaccaggagcgaaaggcaagcccaatttacatacattatattggaaggcgacgttctctcctgataatttgcaagacattgtatttaaattaaatggtgaagcagaacttttctatcgtccatgcagcatcaagaaaccatactctcacaaaatcggtgaaaaaatggtgaaccgaataacaaaagacggcaggccaattcctgacgcgatatttggagagatcttccattatttcaacaattcgacaaagccttctttgagtgacgatgctaaaaaataccttgattttgtaatcgtcaaagatgtaaagcacgaaatcattaaagacaaacgttacaccgaagataaatttgaattccatgtaccattaactattaatttcaaggctgatgacggcagcaaacgcctgaacgaccagattaaggattttctaaagaataatcctgatgtcaatatcattggaattgaccgtggtgaacgcaacttgatttatatgactcttatcaaccagaaaggtgaaattctgatacaaaagagttttaatcttgtcggtaatacaaattaccatgaaaaattgtccattcgcgaacaggaacgtgatgccgcaagaaagagctggcgaagcatcggaaaaatcaaggaactcaaggagggttacctcagccttgtcatccatgaaatagcgaaaacaatgattgaaaataacgctatcattgttcttgaagacttgaattttggatttaaacgtgggcgattctgcgtcgaaaagcaagtgtatcaaaaatttgagaaaatgctaatcgacaaactcaattatcttgtttttaaagattgctcagattctgaatgtgggggaattcttaaaggattccaactcacgcagaaatttgaaagtttccaaaaaatgggcaaacaaaatggattccttttctatgttcccgcagcttacacttctaaaatagacccgacaaccggtttcgtaaatcttttcaattttacagatttgacaaatgcggaaaagaagaaagcgttcctaacgaattttgatgacattacttacgattctaaaacgagtacctttgctcttacttttgattacagcaagttcaaagtgtttcaaaccgattatcaaaagacatggaccattttcaccaacgggaagagaattgtctatgatcgagaatctaagactcataacacaattgaaccgacaacgataatacaggaggccttggaaaagcaaggtattcaatgcgttgatcaattaaatgtattgaccgaaattgaaaaaattgagcccactcgtgaaaatgctcgttttttcgattctatctgttacgcttttgaaaaaacactgcaattgagaaacagtaattctgaaactggtgatgactatatactttctccagtaaaaaacaagaatggaatattctttaatagcaatgaagcagatgataaactccctaaagatgcagacgcaaatggagcattccacatagctttgaaaggattgtatctgctgcaacatatatcagaaaccgacgaaaaattaaaaatacctcatgaaaagtggttcgaattcgtacagtctcggaacaaataa

SEQ ID NO: 399 - protein, 1245 aa, unidentified
MKDLKQFIGLYPVSKTLRFELRPVGRTQEWMEKNHVLEHDGKRAEDYPRVKELIDAYHKICISNSLKVSDINWTPLRDAIEKNRQEKSDESKKALEEEQTKMRLEICKKLAKFEHYQELVKADTPSKLINGILPHDKALDTFNKFAVYFEGFQENRRNIYSSEAISTGVAYRLVHDNFPKFLANIEVFENIKEICPEVIQQVATEMAPFLEGVMIEDVFTVSYYNAVLTQNGIDYYNQILGGVAKDDQKYRGINEFINLYRQAHPELATKKKSLTMVPLFKQILSDRETLSDIVRPVESEKQLIEVINNFYQRITNFDINGKNVNVVKELTDLVLSIDTYNPEGIFISAKSITDVSHSLYDHWNRINEKLYDKAVEAIGGVQTVKNKKKVEAYLKKDAYTLSELSFGDDVSISQYFSALTNSTDSINSLWLQFQSWCKSAEKPQFVHNEVGTEYVKMLLDAIMLVLHKCGALLVSLENELDSDFYNKFLPLYAELENVILVYTRVRNFLTKKLSDTGKIKLKFDTPSLGAGWGINKEKTNKAVLLFKDGLSYLGIMNVKGTLDFNCKIEADEPTFKKMVCRNYSKPYMDLPNSFFSQNGISKFHPSERIQKIYFAFKENSKNVDIKKVHELIDYYKDAISRHEDWGSFGFKYSPTESYETINDFYTEVAAQSYKLRFIEVPQKQVDEWVEEGKLYLFQLYNKDYAEGAHGRKNLHTMYWECLFSEENLSNLFIKLGGQAELFYRPQSIKKPVSHKVGTKMLNRRAKDGKPIPDAIYRSLYQYFNGKKAEAELTTEEKAYISQVIVKDVHHEIIKDRRYTKQFFYQFHVPIVFNANAPQRPKINERVLEYIKENPDVNIIGIDRGERHLVYLTLINQRGEILKQKTFNVVGDYNYQEKLKQRENERDQARKSWQSVGKIKDLKEGFLSAVVHEIAKMMIENNAIVVLEDLNWGFKRGRFKVERQVYQKFEKMLIDKLNYLSFKDVDTSDEGGILRGYQLTEPVANYTDIGKQTGFLFYIPAAYTSKIDPATGFVNHFNFNDITNAEKRKEFFMKMERIEMKNGNVEFEFDYRKFKTYQTDFQNVWTVNTSGKRIVFDTEKREHKAVYPTQEFVQAFGNKGITLEEGMDIKAFIGGIEADIKNASFFSSLFYAFKTTLQMRNSNADTREDYILSPVVHDGRQFCSTDEVNKGKDADGNWISKLPVDADANGAYHIALKGLYLLMNPQTKKIENEKWLQFMAEKPYKE

SEQ ID NO: 400 - protein, 1244 aa, unidentified
MYDLKQFIGIYPVSKTLRFELKPIGRTQEWIEKNHVLEHDWKRAEDYPRVKEMIDVYHKLCISKSLKNMDFDWEPLRDAIERNRQEKSDESKKELEAEQTRMRNKIHDQLSKFEHYKKLNADTPSLLINHILPQEDALESFKKFATYFEGFQKNRKNIYSKEAISTGVPYRLVHDNFPKFLANIEVFENLQELCPEVIRQAATEMAPFLQGVMIEDVFTVGFYNAILTQDGIDFYNQILGGVVKDEQHYQGINQLTNLYRQAHPDLTANRKSMTMVPLFKQILSDRETLSDIAKPIESEEQLIEVVTSFYHRVTDFTLNGNSINIIDELATLVQSLNTYNPEGIFVSAKSLTDVSHTLYGHWNKINEKLYEKAVELFGDVQVVKNRKKVEAYLNKDTYTLAELSFGDDISIAQYFENISGSADATNSLWVQFQSWCKTAEKPKFVHNEAGTELVKMLLDSILNVLHKCSVLVVSMENDLDKDFYNKFLPLYAELENVILLYNRVRNFLTQKPSSTGKIKLKFDIPSLGAGWGINKEKKNKAILLFKDGRSYLGIMNVKGTLDFDCKAEHGEPTYKKMVCVNHSKPYMDLPNSFFRQTGIDKYKPSERILKIYEAFKKDSKSVDINEVRELIDYYKDAITRNEDWNSVSFTYSPTETYETIDDFYKEVAKQSYQVSFKDISQKQVDEWVEKGQLYLFQLYNKDYAEGAHGRKNLHTLYWESLFTAENLSDIVIKLGSNAELFYRPQAIKKPVKHEVGTKMLNRRDNSGKPIPDTIYRSLYQFYNGKKAKAELTAEERAYISQVIVKDVQHEIIKDRRYTKQFHYQFHVPIVFNANANGKVKFNDKVMDYIQDNPDVNIIGIDRGERHLIYLTLINQRGEILKQKTFNVVGNYDYQEKLKQREKERNEARRSWQSVGKIKDLKEGFLSAVVHEIAQMMIEHNAIVVLEDLNRGFKRGRFKVERQVYQKFEKMLIDKLNYLSFKDREIADEGGILCGYQLTEKTLNYSDIGRQTGFLFYIPAAYTSKIDPVTGFVNHFNLNDITNAEKRKAFLMKMERIEVKNGNVEFEFDYRKFKTFQTDFQNVWTVNTSGKRIIFDTETRKAKDVYPTKEIAQSFANRGIALEEGMDLKAIIAEVEPDVKNAAFFKSLFYAFENTLRMRNSNTETQEDYILSPVAINGKQFCTTDEANKGKDADGNWLSKLPVDADANGAYHIALKGLYLLNNPQTKKIENEKWFQFMIEKLYLK

SEQ ID NO: 401 - protein, 1252 aa, unidentified
MKDLKQFIGIYPVSKTLRFELRPVGKTQEWIEKNRVLENDESKAADYPVVKKLIDEYHKVCIRESMKDVHLDWAPLKEAMEEYQKKKSDDAKKRLEAEQTMMRKRIATAIKDFRHYKELTAATPSDLITSVLPEFSDNEALKSFRGFASYFIGFQENRNNIYSPDAISTGVPYRLVHDNFPKFLSNLEVYDKIKATCPEVIQQASEEIQPFLEGVMIDDIFSLDFYNSLLTQDGIDFFNRVIGGVSEEDKQKYRGINEFSNLYRQQHKELAGSKKALTMIPLFKQILSDRDTLSYIPAQIETENELMTSISQFYKHITYFERDGKTINVLNELVALLSKIDTYNPDGICVTANKLTDISQKVFGKWSIIEENLKEKAVQQFCDISVAKNKKKVDAYLSRKAYCLSDLCFDDEFHISQYFSDLPQTLNAIEGYWLQFNEWCKNDEKQKFLNNPAGTEVVKSLLDAMMELSHKCSVLVMPEEYEVDKSFYNEFIPLYEELDTLFLLYNKVRNYLTRKPSDVKKFKLNFETPSLADGWDQNKERANKAILLFKDGLSYLGIMNAQNMPNLNQKWSADESHYSKMVYKLIPGPNKMLPKVFFSKKGLDIFNPSRHILRIKEEETFKKGSPNFKLADLHDLIDFYKDGINRHPDWSKFNFQFADTKAYEDIAGFYRDIANQAYKITFSDIPVWQINDWIDNGQLYLFQLYNKDYAEGAHGRKNLHTLYWENLFTDENLSNLVLKLNGQAELFCRPQSIKKPVSHKMGSKMLNRRDKSGMPIPESIYRSLYQFYNGKKKESELTAAEKQYMDQVIVKDVTHEIIKDRRYTRQEYFFHVPLTFNANAEGNEYINENVLNYLKDNPDVNIIGIDRGERHLIYLTLINQRGEILMQKTFNVVNSYNYQAKLEQREKERDEARKSWDSVGKIKDLKEGFLSAVIHEICKMMIENNAIVVLEDLNFGFKRGRFKVERQVYQKFEKMLIDKLNYLSFKDREAEEDGGILRGYQMAQKFVSFQRLGKQSGFLFYIPAAYTSKIDPITGFVNHFNFNDITNAEKRKEFLMKMERIEMRNGNIEFEFDYRKFKTFQTDYQNLWTVSTYGKRIVMRIDDKGYKQMVDYEPTKDIVNTFKNKGIQLTEGSDLKALIADIEANATNAGFFNTLLYAFQKTLQMRNSNAATEEDFIFSPVARDGRYFCSMDEANKGRDAQGNWVSKLPIDADANGAYHIALKGLYLLRNPETKKIENEKWLQFMVEKPYLE

SEQ ID NO: 402 - protein, 1277 aa, unidentified
MLNLNYYLFYFVSLWQDNEYLKPITMNNLKQFIGIYPVSKTLRFELRPIGKTQEWIEINKVLEGDVQKAADYPTVKKLIDEYHKICIHDSLKNVHFDWAPLKEAIVIFQKTKSDESKKRLEAEQTIMRKQIAAAIKDFKHFKELTAATPSDLITSVLPEFSDDDSLMSFRGFATYFSGFQENRINIYSQESISTGVPYRIVHDNFPKFLSNQEVYDRIRSVCPEVIKQASEELQPFLEGVMIDDIFSLDFYNSLLTQDGIDFYNRVIGGVSEEGKQKYRGINEFSNLYRQQHKDLAASKKAMTMIPLFKQILSDRETLSYIPVQIESEDELVSSIKQFYEHITHFERDGKTVNVLSELVAVLGNIDSYNPDGICISASKLTDISQKVYGKWSIIEEKLKEKAIMQYGDISVAKNKKKVDAYLSRKAYCLSDLCFDEVVSFSRYYSELPQMLNAINGYWMQFNEWCRSDEKQKFLNNPMGTEVVKCLLDAMMELYHKSAVLVMPEEYEVDKSFYNEFIPLYEELDTLFLLYNKVRNYLTRKPSDVKKFKLNFESPSLASGWDQNKEMKNNAILLFKDGKSYLGVLNAKNKAKIKDAKGDASSSSYKKMIYKLLSDPSKDLPHKLFAKGNLDFYKPSEYILEGRELGKYKKGPNFDKKFLHDFIDFYKAAIAIDPDWSKFNFQYSPTESYEDIGAFFSEIKKQAYKIRFTDITESQVNEWVDNGQLYLFQLYNKDYAEGAHGRKNLHTLYWENLFTDENLSNLVLKLNGQAELFCRPQSIKKPVSHKIGSKMLNRRDKSGMPIPENIYRSLYQFYNGKKKESELTTAEKQYMDQVIVKDVTHEIIKDRRYTRQEYFFHVPLTLNANADGNEYINEQVLNYLKYNPDVNIIGIDRGERHLIYLTLINQRGEIIKQKTFNIVNNYNYQVKLEQREKERDEARKSWDSVGKIKDLKEGFLSAVIHEITKMMIENNAIVVLEDLNFGFKRGRFKVERQVYQKFEKMLIDKLNYLSFKDREVGEEGGILRGYQMAQKFVSFQRLGKQSGFLFYIPAAYTSKIDPVTGFVNHFNFNDITNAEKRKDFLMKMERIEMKNGYIEFTFDYRKFKTYQTDYQNVWTVSTFGKRIVMRIDEKGYKKMVDYEPTNDIIYAFKNKGILLSEGSDLKALIADVEANATNAGFFGTLLYAFQKTLQMRNSNALTEEDFILSPVAKDGHHFCSTDEANKGRDAQGNWVSRLPVDADANGAYHIALKGLYLLRNPETKKIENEKWFQFMVEKPYLE

SEQ ID NO: 403 - protein, 1251 aa, unidentified
MKDLKQFIGIYPVSKTLRFELKPIGKTLEWIKKNKVLESDEQKAEDYPKVKTLIDEYHKVCICESLKGVNFDWNPLRLALKEYQSSKSDESKAVLEKEQALMRKQIATVIKDFRHYKELTTPTPQKLIDNVFPSIYESDALKSFNRFAVYFKGFQENRNNIYSSDAISTGVPYRLVHDNFPKFLADIEVFENIKTNCPEVIEQAATELQPFLEGVMIEDIFTIDFYNSLLTQDGIDFFNQVLGGVAEEGKQKYRGINEFSNLYRQQHPEQTAKKKTLTMIPLFKQILSDRDTLSYIPQQIESEQQLIELLNQFYSHITAFDYNGKTVDVLKELTKLTGNINKYNPDGIYLSAKSLTDVSQKLFSKWNVITERLSEEAIKRFGDVSITKNKKKIDAYLSKDAYALSEIPLDNDHSLSMFFAEFPKTIENVGSNWLQFMEWCKGESKQLFLNNADGTEIVKNFLDSIMEILHRCSVLVVSVEHDLDKDFYNDFLPLYAELENAVMVYNRVRNFLTKKPSDTKKFKLNFGVPSLGDGWDQNKERDNKAIILFKDGKSYLGIMNAKDMPIIKERDESTPSSYKKMIYKLLADPAKDFPHTFFSKKGIDTYHPSRYILDGREQGKYKKGETFDKKFMRDFIDFYKDAVAKHPIWSKFNFVYSPTESYEDIGAFFNEVSKQAYKIRFSYIEESQINEWTEKGQLYLFQLYNKDYAEGAHGRKNLHTLYWESLFSPENLSNIVLKLNGQAELFYRPQSIKQPFSHKTGSKMLNRRDKSGMPIPEAIYRSLYQYFNGRKAESELTLVEKSYIDQVVVKDVTHEIVKDRRYTKPEFFFHVPITFNVNADGNEYINEQVMEYLKDNPDVNIIGIDRGERHLIYLTLINQRGEILKQKTFNIVGNYNYHAKLEQREQERDQARKSWQSVGKIKELKEGFLSAVIHEIAMMMIKYNAIVVLEDLNFGFKRGRFKVERQVYQKFEKMLIDKLNYLSFKDRKPDEAGGILRGYQLTQQFTSFQRLGKQSGFLFYIPAAYTSKIDPVTGFVNHFNFNDITNAEKRKAFFMKMERIEMRNGDIEFEFDYRKYKTYQTDYQNIWTVNSSGKRIVMRIDENGRKQMTDYFPTKEIVKAFSDKNITLCEGTDLKALMAVIDTSPKNASLYGTLFYAFQKTLQMRNSDSATEEDYILSPVTQNGKQFNTKDEADKGQDSAGNWVSKFPVDADANGAYHIALKGLFLLMNQQTKKIENQKWLQFMVQKPYKS

SEQ ID NO: 404 - protein, 1249 aa, unidentified
MKDLKQFIGIYSVSKTLRFELRPIGKTQEWIEKNKILESDEQKAEDYPKVKTLIDDYHKVCIRESLRGVHLDWSPLRQALEEYQQTKSDESKAVLEKEQTSMRKQIAAAIKDFRHFRELTAPTPQKLIDDVFPGIYEDEALKSFNRFALYFRGFQDNRNNIYSAEAISTGVPYRLVHDNFPKFLADIEVYENIKATCPEVIEQVAVEMQPFLEGVMIDDIFTLDFYNSLLTQDGIDFFNQVLGGVAEEGKQKYRGINEFVNLYRQQHPELTGKKKALTMVPLFKQILSDRETLSYIPQQIESEQQLIDVLSQFYAHITDYEYNGKTINVLKELSNLTNRIGDYNPAGIFLSAKTLTDVSQKLFGRWSAINDKLYEKAVSQFGDPAIVKDKKKIDAYLAKDAFALSEINLDSEHHLSTYFSEMALVVEQVGSSWLQFKEWCKGSDKQLFLNNADGTEIVKNLLDAMMDILHRCAVLVVPIEYDLDKDFYNDFLPLYAELENVIFVYNRTRNYLTKKPSDTKKFKLNFGTPTLGDGWGVNNERKNKAILLFKEGLSYLGIMNVKGTLKFEETKDASLHSYKKMTCRYLSKPFMDLPHTFFSEKGISTFHPSERIMDIYKNGTFKKDSPSYSIAALHDLIDFYKDAINKHEDWVKYGFSFSPTESYEDISSFYSEIAKQAYKISFTNVSEQQVNDWVENGQLYLFQLYNKDYAEGAHGRKNLHTLYWENLFSEENLNNLVLKLGGQAELFYRPQSINKPAKHVVGSKMLNRRDKSGMPIPEPIYRSLYQYFNGKKQEDELTAAEKAYIDQVVVKDTNHEIVKDRRYTKPEYFFHVPIVFNANADGNEYINERVLDYLKDNPEVNIIGIDRGERHLIYLTLINQRGEILKQKTFNMVGNYNYHAKLELREKERDDARKSWKSVGKIKELKEGFLSAVIHEIAVMMVENNAIVVLEDLNFGFKRGRFKVERQVYQKFEKMLIDKLNYLSFKDRMADEEGGILRGYQLALQFTSFQRLGKQSGFLFYIPAAYTSKIDPVTGFVNHFNLNDITNAEKRKAFLMNMERIEVKNGNVEFEFDYRKFKTYQTDYQNIWTVNTSGKRIVFDSETRKAKDVYPTQEIIAAFKEKGINLNDGTDLKPLIADIEANAKNASFYYAIFDAFKRTLQMRNSNAATEEDYILSPVVCNGKQFCTTDEVNKGKDADGNWLSKLPVDADANGAYHIALKGLYLLNNPQTKKIENEKWFQFMVEKPYLE

SEQ ID NO: 405 - DNA, 3088 bp, unidentified
  source 1..3088: mol_type = other DNA
atgaaggacctgaagcaatttataggcctgtatccggtcagtaaaaccctgagattcgaattaaggcccgtcggacgtacacaggaatggatggagaagaatcatgtgctggagcacgatggcaaaagagcagaagattatccaagggttaaggaactaatagatgcctatcacaagatctgtattagcaattcgctcaaagtatctgacattaattggacgccacttcgggacgcaattgagaagaatcgacaggagaagagtgatgaaagcaaaaaggctctggaagaagaacagactaaaatgcgtctggagatttgtaagaagctcgccaaatttgagcactatcaggaactcgtgaaagccgacacaccttcaaaattaatcaacgggatactccctcacgataaagcgctggacacatttaacaagttcgctgtctactttgaaggctttcaggagaatcggcgaaatatctactctagcgaggcaatatcaaccggtgtcgcctaccgcctggtgcacgataacttccctaaattcctggcgaatatcgaggtcttcgaaaacataaaggaaatttgtccagaggttatacagcaagtggccactgagatggccccatttttggaaggagtgatgatcgaggatgtgtttaccgtaagttattataacgccgttctcacccagaacgggatcgactattacaaccaaatccttggtggcgttgcaaaggacgaccagaagtatcgaggtatcaacgaattcatcaacctttacagacaggctcatccagagctggccacaaaaaagaaaagcctgactatggtccctctatttaagcaaatattaagcgacagggagacactgagtgatattgtccgcccagtggaaagcgagaagcagttgatcgaagtaattaacaacttctaccagcgcatcactaactttgacattaacggtaagaacgtcaatgttgttaaggaattgacagatctggtcctgtcaatcgacacatacaatcctgagggaatctttatctccgctaagtccattaccgatgtgtctcattccctgtacgaccactggaaccgtatcaatgagaaactgtatgacaaagccgtggaagccataggaggggtgcaaactgtgaagaataagaagaaagtggaggcctatctgaaaaaagacgcatataccttgtccgaactgagtttcggggatgatgtatccatctcgcagtacttttctgcccttacgaacagtactgactccattaactccctgtggctgcaatttcaatcatggtgcaagtcagctgagaagcctcaattcgtccataacgaggtgggtactgagtatgtgaaaatgctactggatgctatcatgcttgtactgcacaaatgcggcgcgctgttggtgtccttggagaatgagctcgatagcgacttctacaataaattcctgcccttgtacgctgaattggagaatgttatcctggtctataccagagtacggaattttctaaccaaaaaactctccgacacgggtaagatcaaactcaaatttgatacgccctcactaggggccggatgggggattaacaaggagaaaacgaacaaggccgtgttactgtttaaggacggcctgagttatctgggcatcatgaatgtcaaaggaacattggactttaattgcaagatcgaagctgacgaacctacatttaagaagatggtctgccggaattattctaagccctatatggatcttcccaacagctttttcagccagaacggaatctctaagtttcacccttccgagcgaatccagaagatatatttcgccttcaaggagaactccaaaaatgttgacatcaaaaaggtgcatgagctcatcgactactacaaagatgctatctccaggcacgaggactggggctctttcggcttcaagtactcacccaccgaaagctatgagactattaatgacttctacacagaggtggcagcacagtcttataagcttcgctttatagaggtgccccaaaagcaggtggatgagtgggtcgaagaaggaaaactctacctgttccagttgtacaataaggactacgctgaaggtgcacatggcaggaagaatctccatacaatgtattgggagtgtctgttttctgaggaaaacttgtccaatctgttcataaagctcggggggcaggcagaattattttaccggcctcagtcaatcaagaaacccgtgagccataaagtcggcaccaagatgttgaatagacgggctaaagatggcaaaccgatcccggatgccatttacagatccctctatcaatacttcaatggaaagaaggccgaggcggaactgactacagaggaaaaagcctacatttctcaggttatcgtgaaggatgtgcaccatgagattattaaagatagacggtacaccaaacaattcttctatcagtttcacgttccaattgttttcaacgccaacgcaccacagcggcctaaaatcaatgaacgcgtactcgagtatattaaggagaacccggacgtaaatatcattggaatcgatcggggggaaaggcacttggtgtaccttaccctcattaaccaaaggggtgagatccttaagcagaaaacctttaacgtggttggcgactacaactatcaagaaaaactcaagcagagggagaacgagagagatcaggctcgcaagtcatggcagagcgtcgggaagattaaggatctcaaagaggggttcctgagcgccgttgtgcacgagattgccaagatgatgattgaaaacaatgccatagtggtgctcgaagacctcaattggggattcaaaagagggcggtttaaagtggagagacaggtttaccaaaagttcgagaagatgctgattgacaagctgaattacctgagtttcaaagacgtggacacatctgacgagggcggaatcctacgaggctatcagctgacagagccagtggccaactacactgatataggcaaacagactgggttccttttctacatccccgctgcttataccagtaaaattgaccctgcta

SEQ ID NO: 406 - DNA, 650 bp, unidentified
  source 1..650: mol_type = other DNA
ccggattcgtgaaccacttcaatttcaatgatatcaccaatgccgaaaaaaggaaggagtttttcatgaaaatggagcgcattgaaatgaaaaatggtaacgtagagttcgagtttgactaccgcaagtttaagacctatcagacggatttccagaatgtatggaccgtcaacacatcaggcaagcgcattgtgttcgacactgaaaagcgagaacataaggctgtgtacccaactcaggagtttgtgcaggcttttggcaacaaaggcatcacccttgaggaaggaatggacattaaggcattcataggtgggattgaggccgacattaagaacgcctcttttttttcgagtctgttctacgcgtttaaaactacacttcagatgaggaacagcaatgcggataccagggaagattatatccttagccccgtcgtccacgacgggcgtcagttttgcagcaccgatgaggtgaacaagggaaaagatgcagatgggaactggatttctaagttacccgtggacgcagatgcaaacggcgcgtaccatatcgctctaaaaggcctgtacctgctcatgaatccccagactaagaagatcgagaatgaaaagtggttacagttcatggcagagaaaccatacaaggaatga

SEQ ID NO: 407-410 - skipped (4 entries)

SEQ ID NO: 411 - DNA, 36 bp, unidentified
  source 1..36: mol_type = other DNA
atctacaatagtagaaatttaatatggtcttacacc

SEQ ID NO: 412 - DNA, 36 bp, unidentified; identical to SEQ ID NO: 411
  source 1..36: mol_type = other DNA

SEQ ID NO: 413 - DNA, 36 bp, unidentified
  source 1..36: mol_type = other DNA
gctgtaagagcatattaaatttctactattgtagat

SEQ ID NO: 414 - DNA, 36 bp, unidentified; identical to SEQ ID NO: 413
  source 1..36: mol_type = other DNA

SEQ ID NO: 415 - DNA, 36 bp, unidentified
  source 1..36: mol_type = other DNA
ggtgtaaaccatagtaaaatttctgctattgcagat

SEQ ID NO: 416 - DNA, 36 bp, unidentified; identical to SEQ ID NO: 415
  source 1..36: mol_type = other DNA

SEQ ID NO: 417 - DNA, 36 bp, unidentified
  source 1..36: mol_type = other DNA
atctgcaatagcagaaattttactatggtttacacc

SEQ ID NO: 418 - DNA, 36 bp, unidentified; identical to SEQ ID NO: 417
  source 1..36: mol_type = other DNA

SEQ ID NO: 419 - DNA, 36 bp, unidentified
  source 1..36: mol_type = other DNA
ggtgcaaatacatataaaatttctactattgtagat

SEQ ID NO: 420 - DNA, 36 bp, unidentified; identical to SEQ ID NO: 419
  source 1..36: mol_type = other DNA

SEQ ID NO: 421 - DNA, 36 bp, unidentified
  source 1..36: mol_type = other DNA
gctgttagagcatatgaaatttctactatcgtagat

SEQ ID NO: 422 - DNA, 36 bp, unidentified; identical to SEQ ID NO: 421
  source 1..36: mol_type = other DNA

SEQ ID NO: 423 - RNA, 36 nt, unidentified
  source 1..36: mol_type = other RNA
ggtgtaagaccatattaaatttctactattgtagat

SEQ ID NO: 424 - RNA, 36 nt, unidentified
  source 1..36: mol_type = other RNA
gctgtaagagcatattaaatttctactattgtagat

SEQ ID NO: 425 - RNA, 36 nt, unidentified
  source 1..36: mol_type = other RNA
ggtgtaaaccatagtaaaatttctgctattgcagat

SEQ ID NO: 426 - RNA, 36 nt, unidentified; identical to SEQ ID NO: 425
  source 1..36: mol_type = other RNA

SEQ ID NO: 427 - RNA, 36 nt, unidentified
  source 1..36: mol_type = other RNA
ggtgcaaatacatataaaatttctactattgtagat

SEQ ID NO: 428 - RNA, 36 nt, unidentified
  source 1..36: mol_type = other RNA
gctgttagagcatatgaaatttctactatcgtagat

SEQ ID NO: 429 - protein, 1280 aa, unidentified
MLNLNYYLFYFVSLWQDNEYLKPITMKDLKQFIGIYPVSKTLRFELRPIGKTQEWIEKNKVLEXDEQKAEDYPXVKXLIDEYHKVCIXESLKXVHFDWAPLRXAIEEYQQXKSDESKKXLEAEQTXMRKQIAXAIKDFRHYKELZTAXTPSKLIXSVLPXXXXDDALKSFNXFAXYFEGFQENRNNIYSSEAISTGVPYRLVHDNFPKFLANIEVXENIKXTCPEVIZQAATEMQPFLEGVMIXDIFTLDFYNSLLTQDGIDFXNQVLGGVAEEGKQKYRGINEFSNLYRQQHPELXAKKKALTMXPLFKQILSDRETLSYIPQQIESEQQLIEVIXQFYXHITDFEXNGKTXNVLKELXALXGXIDTYNPDGIFXSAKSLTDVSQKLXGKWXIINEKLYEKAVEQFGDVSVVKNKKKVDAYLSKDAYXLSELXFDDDXSISQYFSELPQXLXAINSXWLQFXEWCKXXEKQKFLNNXXGTEXVKXLLDAXMEXLHKCSVLVVXEEYXLDKDFYNXFLPLYAELENVILXYNRVRNXLTKKPSDTKKFKLNFXTPSLGDGWXQNKERKNKAILLFKDGLSYLGIMNXKGTLXFZBXKXEAXESSYKKMVXKLLSKPYXDLPHXFFSKKGIDXXHPSERILXIYEZGXFKKGSPNFDIKFLHDLIDFYKDAIXRHXDWSKFNFQYSPTESYEDIGXFYSEXAKQAYKIRFXDIXEXQVNEWVENGQLYLFQLYNKDYAEGAHGRKNLHTLYWENLFXXENLSNLVLKLXGQAELFYRPQSIKKPVSHKVGSKMLNRRDKSGMPIPEAIYRSLYQXXNGKKAESELTAAEKAYIDQVIVKDVTHEIIKDRRYTKQEYFZFHVPIXFNANADGNEYINEXVLXYLKDNPDVNIIGIDRGERHLIYLTLINQRGEILKQKTFNVVGNYNYQAKLEQREKERDEARKSWQSVGKIKDLKEGFLSAVIHEIAKMMIENNAIVVLEDLNFGFKRGRFKVERQVYQKFEKMLIDKLNYLSFKDREADEEGGILRGYQLXQKFXSFQRLGKQSGFLFYIPAAYTSKIDPVTGFVNHFNFNDITNAEKRKAFLMKMERIEMKNGNXEFEFDYRKFKTYQTDYQNVWTVNTSGKRIVXXXXDXXXXKMKDXYPTKEIVQAFKNKGITLEEGXDLKALIADIEANAKNASFFGTLFYAFQKTLQMRNSNAATEEDYILSPVAXBGKQFCXTDEANKGKDADGNWVSKLPVDADANGAYHIALKGLYLLXNPQTKKIENEKWXQFMVEKPYLE

SEQ ID NO: 430 - DNA, 3738 bp, unidentified
  source 1..3738: mol_type = other DNA
atgaaagacctaaaacaattcatcggcttatatcctgtatcaaagacattgcgctttgagttgagacctgtgggcagaacgcaggagtggatggaaaagaatcatgtgttggaacatgatggcaaaagggctgaggattatcccagagtgaaggaactaatagatgcttaccacaaaatatgcatcagcaactcgttgaaagtgtctgatattaattggactccgttgcgagatgccattgaaaagaatcgccaagagaagtctgacgagtcaaaaaaggcattggaggaagagcaaaccaagatgcgccttgagatatgcaagaagctggctaagtttgaacactatcaggaactggtaaaagccgatacgccatctaagcttattaacggtattcttcctcatgataaggctttagatacgttcaacaagtttgctgtttactttgagggctttcaggagaacaggagaaatatctatagtagtgaagctatcagtacgggcgttgcttatagacttgttcacgataatttcccaaagttcctggccaatattgaggtgtttgaaaacatcaaggagatttgtccagaagtcatccaacaggtagctacagaaatggctccattccttgaaggtgttatgattgaggatgtatttactgtcagctactataatgccgttttaactcaaaatggtatagattactataaccagattctgggcggagtggcaaaagatgatcagaagtatcgtggcatcaatgagtttataaacttataccgtcaggctcatccagagttggctacaaagaagaagtcgctaacgatggtgccactcttcaagcagattttgtcagacagagaaacactttcagatatagttcgccccgttgaatcagagaaacagctgatagaggtgataaacaatttctatcaacgcattactaactttgatattaatggaaagaatgtcaacgtcgttaaagaactgaccgatttggttttaagtattgatacgtataaccctgaaggtatctttatttcagccaaatcaataaccgatgtatctcattccttatatgaccattggaatagaattaacgagaagctttatgacaaggctgtggaggcaattggaggtgttcagacagtgaagaacaaaaagaaggtggaggcttatttgaaaaaagatgcctatacgctttctgaactgagctttggcgatgatgtttctatctctcagtatttctctgcattaacgaattccactgactccatcaatagcttatggttgcaatttcagagttggtgcaagtcggcagagaaaccacaattcgtccataatgaggttggtacggaatacgtaaagatgctgttggatgctatcatgcttgtattgcacaagtgcggagcacttctggtatccttggaaaacgaattggacagcgacttctataacaagttcctgccgctctacgcagaactggagaatgtgatattggtttatacaagagtaaggaacttcctcaccaagaagctttctgatacaggcaagataaagctgaagttcgatacaccctcgcttggtgctggatggggcatcaataaagagaagacgaataaagctgtattattgttcaaggacggattatcatatctgggtattatgaacgtcaaaggcacgttagactttaattgcaagatagaagctgacgagccgacgttcaagaaaatggtttgcagaaactattccaaaccttacatggacctgcctaattcattcttcagccagaacggaataagcaagttccacccgtctgagcgaatccaaaagatatattttgcattcaaagagaattcaaaaaacgttgatatcaagaaggtgcacgaactgatagattactacaaagatgctatcagtcgccatgaagattggggatcatttggctttaagtattctcccacagaatcctacgagaccatcaatgatttctatacagaggtggctgcgcaatcatacaaacttcgtttcatagaagttccccaaaaacaagttgacgagtgggttgaagaaggaaaactctacttgttccaactatataacaaagattatgcagagggcgctcatggtcgcaagaatcttcacacgatgtattgggagtgcctcttctctgaagaaaatctcagcaacctgttcatcaagttgggaggtcaggcagaattgttctatcgcccacaaagcatcaagaaaccagtatcacataaagttggcacgaagatgctgaatcgcagagcgaaggacggaaagcctataccagatgctatatatcgtagtctctatcagtatttcaatggcaagaaagcggaagcagaactgaccacagaagaaaaggcctatatcagccaggtcatcgtgaaggatgtgcatcacgaaatcatcaaggacagacgttacaccaagcagttcttctatcaattccacgtgcctatcgtgtttaatgcaaatgctccccaaagaccgaagattaatgagagggttttggaatacatcaaggagaatccagacgtaaacatcatcggaatagaccgtggtgagcgccacttggtttatcttacccttatcaatcagcgaggagagattctgaagcagaagaccttcaacgttgttggcgattacaactatcaggagaaactaaagcagcgcgaaaatgaacgagaccaagcgcgaaagagctggcagagcgtaggtaaaatcaaggacctgaaagaaggtttcctttctgctgttgtgcatgagatagccaagatgatgatagaaaataatgccatcgtggttcttgaagacctgaattggggattcaagcgtggccgtttcaaggtggaacgccaggtgtatcagaaattcgagaagatgctgattgacaaactgaactacctgtcgttcaaagatgtagatacgtcagatgaaggtggcattcttcgtggttaccaattaacagagccggtggctaactatacggatattggcaaacaaacgggcttccttttctatattcctgctgcctatacgtcaaagattgatcctgcaacggggtttgttaaccacttcaacttcaacgacatcaccaatgccgagaagcgcaaagaattcttcatgaagatggagcggattgagatgaagaacggcaacgtggagtttgagtttgactatcgcaagttcaaaacctatcagacggacttccagaacgtgtggacagttaatacctctggtaagcgtatcgtcttcgatactgagaagagggagcacaaagctgtttatcctacgcaggaatttgtgcaggcttttggcaataagggtataacgcttgaagaaggaatggatatcaaggcgtttattgggggaatcgaagctgacatcaagaatgcgtcattcttcagttcactcttctatgcgttcaagactactctgcagatgcgtaacagtaatgccgatacaagagaggactatatcctttcgcccgtagttcatgacggcaggcagttctgttctacagacgaagtcaacaagggcaaggacgcagacggcaattggatatcaaaactacctgtagatgccgatgccaatggtgcataccacatcgctctgaagggtctctacctactaatgaacccgcaaacaaagaagatagaaaacgaaaaatggctccagttcatggccgaaaagccgtataaggagtaa

SEQ ID NO: 431 - DNA, 3735 bp, unidentified
  source 1..3735: mol_type = other DNA
atgtacgacctgaaacaatttatcggcatatatccagtttcaaagacgttgcgctttgagttgaaacctattggcagaacgcaggaatggatcgagaagaatcatgtgctggaacatgattggaagagggctgaggattatcccagagtgaaggagatgattgatgtttaccacaaattgtgcatcagcaagtcgttgaaaaacatggattttgactgggaacccctgcgcgatgcaattgagcggaatcgtcaggagaagtcagacgaatcgaagaaagaattggaggcagagcagaccaggatgcgcaacaagatacatgatcagttatcaaaatttgaacattacaaaaagctcaacgccgatacgccatcgttgctgattaatcacattctgccccaagaagatgccttggagagcttcaagaagtttgctacgtattttgagggatttcagaagaacagaaagaacatttacagcaaggaggccatcagtactggtgtaccataccgacttgtacacgacaacttccctaagttcttagcaaacattgaggtctttgaaaacttacaggagctctgccctgaagtcattcggcaggccgctacagaaatggcaccttttctgcaaggagtcatgatagaggatgtatttaccgtcggcttttataacgctatactgacgcaagatggcattgatttttataatcagattctgggtggagtggtaaaagacgaacaacactatcaaggtattaaccaattgacgaatctctacagacaggctcatccagaccttaccgccaataggaaatcgatgacaatggtgccgctcttcaagcagattctgtcagaccgcgaaacgctttcagatattgccaagcctatcgagtcggaagaacaactgatagaggttgtaaccagtttctaccatcgcgttacggatttcacactcaacggaaacagcatcaacatcatcgacgagctagcgactctcgtgcaaagtctcaatacctataatcctgagggaatattcgtttcggctaagtcattgacagatgtctctcatacgttgtatgggcattggaacaagatcaacgaaaaactctatgaaaaggctgtcgaattgtttggtgatgttcaggtggtcaaaaacagaaagaaggtagaggcttatctgaacaaagacacatacacactcgcagaactgagtttcggcgacgatatttccattgcacaatacttcgaaaacatctctggttccgctgatgccacaaacagcctttgggtacaattccaaagctggtgcaaaacggcagagaagccaaaattcgtacacaacgaggctggtacagaactcgttaagatgctgttggattccatcttgaacgtactgcacaaatgctcagttttggttgtatcgatggaaaacgacttagacaaagacttctacaataagttcttgcctctctatgctgaattggagaatgtgatattgttatataacagggtgcgaaatttcctcacgcagaagccatcgagtacgggcaagataaaactgaagttcgacatcccttcgcttggcgctggttggggcatcaacaaggaaaagaagaataaggcaatattgctattcaaagatggacgttcttatcttggcattatgaatgttaaaggaacgttagattttgactgcaaagcagaacatggcgagcctacatacaagaaaatggtttgcgtaaaccattccaagccttacatggatttgcccaattcattcttccgtcaaacaggcattgacaagtataagccttcagagcgcatcttgaaaatctatgaggcatttaagaaagattcaaagagtgtagatatcaatgaggtgagagaacttatagactattacaaggatgctatcaccagaaatgaagactggaattctgttagcttcacttattctcccacggaaacctatgaaaccattgacgacttttataaggaggtcgccaaacaatcctatcaagtcagttttaaggacatatcccaaaaacaggttgacgaatgggttgaaaaggggcagttatatctcttccagctttacaacaaagattatgcagaaggtgctcatgggcgcaagaatcttcataccctgtattgggaaagtctctttactgctgagaatctaagcgacatagttataaagctgggaagcaacgcagaattattctatcgtccgcaggccattaagaaacctgtaaaacacgaggtaggcacaaagatgctaaaccgcagggataatagcggaaagcctatacctgataccatctatcgtagcctctatcagttctacaacggcaagaaagcaaaagcagaactgacggcagaagagcgtgcttacatcagtcaggtgatagtgaaagacgtgcagcacgaaatcatcaaggaccgccgatacaccaagcagttccactaccagttccacgtacctatcgtgtttaatgcgaatgccaatgggaaggtcaagttcaacgacaaggtgatggactacatccaggataatcctgatgtcaacatcatcggaatagaccgtggtgagcgtcatctgatttatctgacattaataaaccaacgcggcgagattctgaagcagaaaacctttaatgtggtaggcaactatgactatcaggagaagctgaagcagcgtgagaaggagcgcaacgaagcccgtagaagctggcagagcgtaggtaagattaaggatctgaaagaaggttttctgtcagctgtggttcacgagatagcccagatgatgattgaacataacgcaatcgtcgtgctcgaagacctgaatcgcggttttaagcgcggccgcttcaaggtggaacgtcaggtgtatcagaagtttgagaagatgctgatagacaagctgaactatctgtcgttcaaagaccgcgagattgctgatgaaggcggcatcttgtgtggttaccaactgacggaaaagacattgaactactctgacattggtcgccagactggattcttgttctacattcctgcagcctacacgtcgaagattgaccctgtaacggggtttgtcaaccacttcaacctgaacgacatcaccaatgccgaaaagcgcaaagcattcctaatgaagatggagcgcatcgaggtgaagaacggcaacgtggagtttgagttcgactatcgtaagttcaagacgttccagacggatttccaaaatgtgtggactgtcaatacctcaggcaagcgcatcatattcgacacagagacgcgaaaagcgaaggatgtttatcctacaaaagagattgctcagtcttttgccaatagaggcattgctcttgaagaaggaatggacctgaaagcaatcattgcagaggttgagccggatgtcaagaatgctgcgttctttaagtctttgttttatgcatttgaaaacaccttgcgaatgcgtaatagcaatactgaaacgcaagaagattatatcctgtcgccagtcgctatcaacggcaaacagttctgcactacggacgaagcaaacaagggtaaggatgccgatggcaattggctttccaaactccctgttgatgccgacgccaatggtgcctatcacattgccctcaagggtctctacctgctaaataaccctcaaacaaagaagatagaaaacgaaaaatggttccaatttatgattgaaaagctctatttaaagtaa

SEQ ID NO: 432 - DNA, 3759 bp, unidentified
  source 1..3759: mol_type = other DNA
atgaaggacttaaaacaatttatcggcatatatccagtatcaaagactttgcgctttgagttaaggcctgtaggcaaaacccaggaatggatagaaaagaacagggtgttggaaaatgatgagagtaaggctgcggattaccctgtggtcaagaaactcattgacgagtatcataaggtttgcattcgcgaatccatgaaagatgtccatcttgactgggcacctctaaaggaggccatggaggaatatcagaagaagaaaagcgatgatgccaagaaacgcctggaggcagaacagacgatgatgcgcaaacgaattgctactgcaatcaaggatttcagacattacaaggaactgacggcagcaactcccagcgatttgattacatcagtattgccagagttcagtgataatgaggctttgaaatcatttcgaggattcgcttcctatttcataggcttccaagagaatcggaacaacatctatagtcctgatgctatcagtacgggtgtcccatatagattggtgcatgacaatttccccaaattcttatccaatctggaagtttatgataagatcaaggccacttgtcctgaggtcatccaacaggcatcagaggaaatacagcctttcttggagggtgtgatgattgatgatatcttctcgcttgatttttataactctctgctaacacaggatggcattgacttctttaaccgtgtgattggtggtgtgagcgaagaggataagcagaaatatcgtggcatcaacgagttctctaacctctatcgccagcagcataaggaactggctggttccaagaaggccttgacgatgattccattgtttaagcagatcttgtctgatcgtgacaccttgtcatatatccctgctcagatagaaacggaaaatgaactcatgacctctataagccaattctataagcacatcacctatttcgagcgtgatggaaaaaccatcaacgtactaaatgaattggtggctctgctaagcaagattgatacttataatccagatggtatttgtgttacagctaacaaactgactgatatctcgcagaaggtattcggcaagtggagtatcatcgaagagaatctgaaggaaaaggctgtccagcaattttgcgacatctctgtagccaagaataagaaaaaggtggatgcctatctttcgcgtaaggcttattgtctttctgacttgtgctttgatgacgagttccatatttcccaatatttttcagatcttcctcaaacgctcaatgccattgaaggctattggctgcagtttaatgaatggtgcaaaaacgatgaaaagcagaagttcctgaataatccagcgggtacggaagttgtgaagagcctcctggatgccatgatggaactctctcacaaatgttccgttctggtgatgccagaagagtatgaggtggacaagagtttctataatgagttcatccccctttatgaggaacttgacacgctcttccttttatataataaggtaaggaactaccttactcggaagccttctgatgtcaagaagttcaaactcaactttgaaactccatcattagctgacggatgggatcagaacaaggaaagagctaacaaggctattctgcttttcaaagacgggttatcctatttgggaatcatgaatgcccagaacatgccaaacctgaatcaaaaatggtcagcggatgaaagccattatagtaagatggtttacaaactgatacctggtcctaacaagatgttgccaaaggtgttcttctccaagaaaggactcgacatattcaatccgtccagacatatcttgagaatcaaggaggaagagaccttcaagaaaggctctcccaatttcaaacttgctgacctgcatgacctgattgatttctataaagatgggattaaccgtcatccggactggagcaagttcaatttccagtttgctgatactaaggcgtatgaggatattgcaggtttctatcgtgatatagctaatcaggcatacaagattacattctcggatatccctgtctggcaaatcaacgactggattgataatggccagttatatctgttccaactctataataaggactatgctgagggcgctcacggacgaaagaatcttcatacactctattgggaaaatctattcacagacgagaatctcagcaacctggtgctgaaactaaatggccaggcggagttgttctgtcgccctcaaagcattaagaaacccgtatcgcataagatgggctcgaagatgctcaatcgtagggacaagagtggaatgccgataccagaatccatctatcgcagcctgtatcagttctataatggcaagaagaaagaaagcgaactgacagctgcagaaaagcagtatatggatcaagtcatcgtgaaggatgtcacccacgagattatcaaagatcgcagatataccagacaggaatacttcttccatgtacctcttacattcaatgcgaatgcagaaggtaatgagtatatcaatgagaatgtgctgaattatctgaaagacaatcctgatgtgaatatcattggtatcgatcgtggtgagcgtcatctcatctatctcacactgattaatcagcgtggagaaatcttaatgcagaagacgttcaacgtagtgaatagctacaattaccaggcaaagttggagcagcgcgaaaaagaacgtgacgaggcccgtaagagttgggatagtgtaggtaaaatcaaagacctgaaagaaggtttcctttctgctgttatccacgagatttgcaagatgatgatcgaaaacaatgccatcgtggtattggaggatttgaactttggattcaaacgcggtcgtttcaaggtagagcgtcaggtctatcagaagttcgaaaagatgctgattgataaactgaactatctttcctttaaggatcgtgaggccgaagaggatggtggtatactcagaggctatcagatggcacagaagtttgtcagcttccagagacttggtaagcagagcggcttcttgttctatatccctgctgcctatacctcaaagatagatcccataactggttttgtgaatcatttcaactttaacgatatcacaaatgctgagaagcgaaaagaattcctgatgaagatggaacgcattgagatgagaaatggaaatatcgagtttgaattcgactatcgtaagtttaagactttccagacggactatcaaaacctttggacggtcagtacctatggtaagcgaatcgtgatgcgaatagacgataaaggatataaacagatggttgactacgagccaacaaaggatattgtcaatacctttaagaacaaaggcatacaactgacagaaggttctgatcttaaagccctgattgctgatattgaggctaatgctaccaatgctggctttttcaacaccttgctttatgcattccagaagaccttgcagatgcgtaatagcaatgctgcaacggaagaagattttattttctcgccagtagccagagacgggcgctacttctgcagtatggatgaggctaacaagggcagagatgcacaaggcaactgggtatcaaagcttcctattgatgcagatgcgaatggtgcctatcatattgctttgaagggactatacttgctcagaaatccagaaacgaagaaaatagaaaacgaaaaatggctccaatttatggtagagaaaccgtatttggagtaa

SEQ ID NO: 433 - DNA, 3834 bp, unidentified
  source 1..3834: mol_type = other DNA
atgctcaatttgaattattatctattttattttgtatctttgtggcaagataatgaatatttaaaacctattacaatgaacaacttaaaacaatttatcggcatatatcctgtttcaaagaccttgcgctttgagttgagacctattggtaagacacaagaatggatagaaattaataaggttttagaaggtgatgtacagaaagccgcagattatcctacggtcaagaagcttattgatgagtaccataaaatttgtattcatgactctttaaaaaacgttcactttgattgggctcctttgaaagaagctattgtcatttttcaaaagaccaagagtgacgagtccaagaaacgacttgaggcagagcagaccatcatgcgtaaacagattgctgctgcaatcaaggatttcaagcatttcaaggagttaacagctgcaacccccagcgatttgattacctcagtccttcctgaattcagcgatgatgactcattgatgtctttccgtggctttgctacctatttcagcgggtttcaagagaacagaattaatatctatagtcaggaatccatcagtacgggagttccttatagaatagtacatgataactttcctaagttcctttctaaccaggaggtctatgacagaatcaggtctgtatgcccagaagttatcaagcaggcatcagaagagttacagccttttttagaaggggtaatgatcgacgatatattttcacttgatttctataattctctattgactcaggacggaatagatttctataaccgtgtaattggtggtgtgagcgaagaaggtaaacagaaatatcgtggaatcaacgagttctcaaatctctatcgtcaacagcacaaagatcttgcagcctccaagaaggctatgacgatgatacctcttttcaaacagattttgtctgatcgtgaaactttgtcatacattcctgtacagatagaatcagaagatgagctagtatcttctatcaaacaattctatgagcatattacccacttcgagcgggatggaaaaacggtcaatgtgctatcagaattggtggctgtgctggggaatatagactcatataatcctgatggtatatgtatatcagccagcaaactgacagacatatctcagaaggtatatggcaagtggagcattatcgaagagaaactgaaagaaaaggctatcatgcagtatggtgacatctctgtagccaagaataagaagaaagtagatgcatatctttcacgtaaagcctattgcttgtctgatttgtgttttgacgaggttgtcagtttctcacgctattactctgaattaccacaaatgctcaatgctattaatggctattggatgcagtttaacgaatggtgtaggagtgatgaaaaacagaagttccttaataacccaatgggtactgaagtggtgaagtgtctgttagatgcaatgatggagctataccataagagcgcagtcttggtaatgccagaagagtacgaggttgacaagagtttctataacgaattcatacccctctatgaggaacttgatacactcttcctgttatataataaggtaaggaattacctcactcgaaaaccatctgacgttaagaagtttaaactaaattttgagtcgccttcattggcaagtggatgggaccagaataaggaaatgaagaataacgcgattcttcttttcaaggatggtaaatcgtatttaggtgttttaaatgccaagaacaaagcaaagataaaagatgccaagggcgatgcgtcatcttcttcatataaaaaaatgatttacaaacttctgtctgatccgtcaaaggatctgccccataagttattcgctaagggtaatcttgatttctacaagccatcagagtatatcttagaaggaagggaattgggtaaatacaagaaaggaccaaattttgacaagaagttccttcatgactttatagatttctacaaggcggcaattgctattgatcctgattggagcaagttcaacttccagtattctccaacggagtcgtatgaggatattggtgccttctttagtgaaatcaagaagcaggcttacaagattcgttttactgatataacagagtctcaggtgaacgagtgggttgataatggtcagttgtatctgttccagctgtataataaggattatgcagaaggggctcatggacgaaagaatctgcatacactctattgggagaatctttttactgatgagaatttgagtaatctggttctgaaactaaatggtcaggcagaattgttctgccgtcctcagagtatcaagaagcctgtgtcgcataagattggttcgaagatgctgaatcgtagggataagagcggtatgcccataccagaaaatatctatcgcagtttgtatcagttctataatggtaagaagaaagagagtgagctaacaactgcagaaaagcagtatatggatcaggtgatagtgaaggatgttacccacgaaatcattaaagaccgcagatacaccaggcaagaatacttcttccatgtacctctgacgttaaatgccaatgctgatggtaatgagtatattaatgagcaagtgctgaactatctgaagtataatcctgacgtgaatatcataggtattgaccgtggtgaacgtcatctgatttacctcacattgattaatcagcgtggagaaatcataaagcagaagacttttaacattgtgaataattacaactatcaggtcaagttggaacagcgagaaaaagaacgcgacgaggctcgtaaaagttgggatagtgttggtaaaataaaggatttgaaagaaggctttctttctgccgttatccatgagataactaagatgatgattgaaaacaatgccatcgtggttcttgaggatttgaactttggtttcaaacgtggtcgttttaaagtggagcgtcaggtatatcagaagttcgagaaaatgctgatagataagctgaattatctgtcatttaaggatcgtgaggtaggcgaagaaggaggtatacttagaggttaccagatggcacagaagtttgttagtttccagagattaggtaaacagagtggtttcttgttctatattcctgcagcttatacctccaagatagaccctgtgacaggctttgtaaatcatttcaacttcaacgatatcaccaatgcagaaaagcgaaaagacttcttgatgaagatggagcgcattgagatgaagaatggatatatagaatttacattcgactatcgtaagtttaagacttaccagacagactatcaaaacgtttggaccgtaagtactttcggaaaacgaattgtgatgcgaatagacgaaaaaggatataaaaagatggtggattacgaaccaacaaacgatattatttatgcctttaagaacaaaggcatcctgttgtctgagggttctgatttaaaggcgctcattgcagatgttgaggccaatgctactaatgcaggcttctttggcacgctgctctatgcattccaaaagactctacagatgcgtaacagcaatgctttaacggaagaagatttcatcctttcacctgtagcaaaagatgggcatcacttctgcagcactgatgaggcaaacaaaggcagagatgcgcagggcaactgggtatcaaggctacctgtagatgcagatgcaaatggcgcatatcacatcgctttgaagggactttatctgctccgaaaccctgaaacgaagaaaatagaaaacgaaaaatggttccagtttatggttgagaaaccatatttggagtaa

SEQ ID NO: 434 - DNA, 3756 bp, unidentified
  source 1..3756: mol_type = other DNA
atgaaggatttaaaacaatttatcggcatatatccagtctcaaaaacattacgttttgagttgaagccaattggtaaaacacttgaatggataaagaagaacaaagttcttgaaagtgatgagcaaaaagctgaggactatccaaaagtgaagacattgattgatgaatatcacaaagtctgcatttgtgagtctttgaaaggagtcaattttgactggaatccacttagattggctttgaaagaataccaaagtagcaagagtgatgagagcaaagccgttttggagaaagaacaagcattaatgcgtaaacagattgccacagtcatcaaggactttcgacactataaggaacttactacccccacaccacagaaacttattgataatgttttccctagcatttatgagagtgatgccttgaagtcattcaacagatttgccgtttatttcaaaggtttccaagagaatcgtaacaacatttatagctcagatgctattagtactggtgtaccttatagacttgttcacgacaattttccaaagtttttggcagacattgaagtctttgagaatatcaagacgaactgccctgaggtcatagaacaggcagcaacagaattacagccattccttgaaggagtaatgattgaggatatttttacgattgatttctacaactcccttctaactcaagatggtatagatttctttaatcaagtattgggtggagtagcagaagaaggcaagcaaaagtatcgcggcatcaacgagttctccaatttgtatcgtcaacaacatcctgagcaaacagcaaagaagaaaaccctcaccatgattccgcttttcaagcagatactttcagatagggatacgctttcttacattccacagcagatagagtcagaacaacaattgatagaactattaaaccagttctattctcacatcacggcctttgactataatggcaagactgttgatgttcttaaagaattgaccaaattaactggcaatatcaacaaatacaaccctgatggcatatatctttctgccaagtcattgacagacgtttcgcaaaagttgtttagtaaatggaacgtcattacagaaaggctttctgaagaggcaataaaaagatttggggatgtatcgataactaaaaataaaaagaagattgacgcttatctgtcgaaagatgcttatgcgctttcagaaatacccctcgacaatgaccattcattgtcaatgttctttgcagagtttcccaaaaccatagaaaatgttggcagcaactggctacaatttatggaatggtgcaaaggagagagtaagcaactcttcctcaataatgctgatggtacagaaatcgttaagaacttccttgattctattatggaaatcctacatagatgttctgtgcttgtggtttctgtagagcatgatttagacaaagatttctataatgatttcttgccactttatgcagaattagagaatgcagtaatggtttataatcgtgtacgcaatttcctgacgaagaagccttctgatacaaagaaatttaaattgaattttggtgtaccttcgttaggagatggttgggaccagaataaagagcgagacaacaaggccattattcttttcaaagatggtaaatcttatttgggcatcatgaacgcaaaggatatgcctataataaaagaaagagatgaaagcactccatcatcttataagaagatgatatacaaattgctcgctgaccctgccaaggattttccgcatacattcttttcgaaaaaaggaatagacacatatcatccttcaagatatattcttgacggacgtgagcaaggaaaatataagaagggggaaactttcgataaaaagttcatgcgggattttattgatttctataaggatgctgtggcgaagcaccctatttggagtaaattcaatttcgtctattctcctactgagtcatacgaagatataggtgctttcttcaatgaggtgtctaagcaagcatacaagattcgcttctcttatattgaagaatcgcaaatcaatgaatggacagagaaaggccaactttatcttttccagttatataacaaggactatgccgaaggtgctcacggacgaaagaaccttcataccctgtattgggaaagtttattctctcctgaaaatctcagcaacattgtgctgaaactgaacgggcaggcagaattgttctatcgtccacaaagtatcaagcaaccattttcacataaaacggggagcaagatgcttaatcgcagggacaagagtggtatgcccatccctgaagcaatctacagaagtctgtaccaatattttaatggcagaaaggctgaaagcgaattgactcttgtcgaaaagtcctatattgaccaagtggttgttaaagatgtgactcatgagatagtaaaggacaggagatacaccaagcctgaatttttcttccacgttcctatcacattcaatgtcaatgcagatggaaacgaatatatcaatgagcaggtgatggaatatctcaaggataatccagacgttaacatcatcggaatagacaggggtgaacgccacctaatatatcttacactaattaaccaacgaggtgagatattgaagcaaaagacattcaatatagttggcaactataactatcatgccaaactggaacagcgcgaacaggagcgtgatcaagctcgtaagagttggcaaagcgttgggaaaatcaaagaactgaaggaaggtttcctttctgctgtcatccatgagatagccatgatgatgataaaatacaatgccattgtagtgcttgaggacttgaatttcggatttaagcgtggacgtttcaaagtggaacgacaagtgtatcagaagtttgagaaaatgctaattgacaaactaaactatctctcctttaaagaccgcaaacctgatgaagcaggaggcatcttacgtggttatcagttgacacagcagtttacgagtttccaaagacttggaaaacaaagtggattccttttctacattcctgctgcctacacctcgaagatagacccagttacaggctttgtcaaccatttcaacttcaatgacatcaccaatgcagaaaaacgaaaggcattcttcatgaagatggaacgaatagagatgcgcaatggcgacatcgagtttgaattcgactatcgcaagtacaagacctatcaaacagactaccaaaacatctggacggttaatagttctggcaaacgcattgtgatgaggattgatgagaatgggcgtaagcaaatgacggattacttcccaactaaagaaatagtgaaagccttttcagataaaaacattacactttgcgagggtacagacttgaaagctttgatggcggtgattgatacaagccccaagaatgcatcattgtatggaacactgttttatgctttccaaaagaccttgcagatgcgtaatagtgattctgcaacagaagaagattacattctttcaccagttactcagaacggaaagcaattcaataccaaagatgaggctgacaaaggacaagattctgctgggaactgggtctcaaagttcccagtagatgcagatgctaacggagcatatcatatagcactaaagggtctcttcttgcttatgaatcaacagacaaagaagatagaaaaccaaaaatggctccagtttatggttcagaagccatataagagctaa

SEQ ID NO: 435 - DNA, 3750 bp, unidentified
  source 1..3750: mol_type = other DNA
atgaaagacctaaaacaatttatcggcatatattcagtctcaaagacattgcgctttgagttaagacctattggcaagacacaagaatggatagaaaagaacaagatactggagagtgatgagcagaaagcagaggactaccctaaagtgaagaccctcatagatgactatcataaggtatgtatccgcgaatcgctgagaggtgttcatttagactggagtcctttgaggcaagcattagaagaataccagcaaaccaagagtgacgagagtaaggctgtactggagaaagagcaaacctcgatgcgtaaacagattgctgctgcaatcaaggatttccgccatttcagggaactgactgcgccaacaccacagaagttgattgatgacgtgtttcctggcatctatgaagacgaggcattgaagtctttcaacaggtttgctctgtatttcaggggattccaagataacaggaacaatatctatagtgctgaggccattagtacaggggtgccctataggcttgttcatgacaatttccccaagttcttagcagatatagaagtttatgaaaatatcaaggccacatgcccagaggtcatcgagcaagtggctgtagaaatgcagccattccttgaaggtgtgatgatagatgacatcttcacgctcgacttctacaattcgcttttaactcaagatggtattgatttctttaatcaggtattaggcggcgtagctgaagaagggaagcaaaagtatcgtggcatcaacgaattcgtcaacttgtatcgacagcagcatcctgagttgacaggaaagaaaaaagccttgacgatggtaccactattcaagcaaatactgtcggacagggagacgctttcgtatattccgcagcagatagaatcagaacaacagttgatagatgttttgagtcaattctatgcccacattaccgattatgaatataatggcaagaccatcaacgttctgaaagaactatccaacctgacgaataggattggggactacaatcccgccgggattttcctttctgcaaagacattgactgatgtttctcagaagttgtttggtagatggagtgccatcaacgataaactctacgagaaggctgtcagccagtttggcgaccctgctattgtcaaggacaaaaagaagatagatgcctatcttgcgaaagacgcattcgcgctttcggaaatcaatcttgatagcgaacatcatttgtcgacgtatttctcagaaatggcccttgtcgtagaacaagtaggtagtagttggctacaatttaaggaatggtgcaaaggcagcgacaaacagctgttccttaataacgcagatggaacagaaatcgtcaagaatctgttggacgctatgatggacattctgcacagatgcgctgtgcttgttgtcccaatagagtatgatttggacaaggatttttataatgacttcctgccactctatgctgaactggaaaacgttatctttgtctataacaggacaagaaactatctaaccaagaaaccttctgacaccaagaagttcaaactgaactttggaacgccgacattgggcgatggatggggagtgaacaacgaaagaaagaacaaggctattcttttgtttaaagaaggtctgtcctacttaggcattatgaatgtgaaaggcactctaaagtttgaagagaccaaggatgccagtttgcattcatacaagaagatgacatgtaggtatctgtcaaaaccctttatggacttgcctcacaccttcttttcagagaaaggcattagtactttccacccatcagagcgtatcatggatatctataagaatggtacattcaagaaggattcgccaagctatagtatcgcagcgctgcacgacttaatcgacttctataaagacgctatcaacaaacatgaggattgggttaaatatggcttttcattctcacccacagagtcctacgaagatatcagttcgttctattctgaaatagccaagcaggcatacaaaatcagctttaccaatgtctctgaacaacaagttaatgactgggtagagaacggacagctttatctgttccaattatataataaggattacgccgagggtgctcatgggcgtaagaatctgcatacgctctattgggagaatcttttctctgaagagaatctcaacaaccttgttctcaagttgggagggcaggcagaactcttctatcgccctcaaagcatcaataagccagccaagcacgttgttggcagtaagatgctgaatcgcagggacaagagcggaatgcctattccagaacctatttacagaagtctttaccagtatttcaacggtaagaaacaagaagatgaactgacggcagcggagaaagcatacatcgaccaagttgttgttaaagataccaatcatgagattgtcaaggatagaagatacacaaaaccagaatacttcttccatgttcccattgtattcaatgctaacgctgacggcaacgaatatatcaacgaaagggtgcttgactatctaaaggataatcctgaagtgaacatcatcggcatcgatcgtggtgagcgtcatctgatatatctgacactcatcaaccaacggggtgagattttgaaacagaagaccttcaatatggttggcaactacaactatcatgccaagttggagttgcgcgagaaagaacgtgatgatgccaggaagagttggaagagtgtaggtaaaatcaaggaattgaaagaaggtttcctctcagctgttattcacgaaatagctgtgatgatggttgagaataatgccattgttgtgctcgaagacctaaacttcggcttcaagcgtggtcgttttaaagtggagcgccaagtatatcagaagttcgagaagatgctgattgacaaactgaactacttgtcattcaaagaccgcatggctgatgaagaaggtggcattcttcgaggctaccagctggctctgcaattcacgagtttccaaagacttggaaagcaaagcggtttcttgttctacattcctgctgcctatacgtcgaagattgatcctgtgacgggttttgtcaaccacttcaacctgaacgacatcaccaatgcagaaaagcgtaaggcattcttgatgaatatggagcgtattgaggtgaagaacggcaatgtggagttcgagttcgactatcgtaagttcaagacctaccagacagactatcagaatatatggacggtcaatacctcaggcaagcgcattgtttttgattcagaaacaagaaaggccaaagacgtataccccacgcaagagattattgctgccttcaaggaaaaaggcatcaatctaaatgatggaacggatttgaaacccttaatcgctgatattgaggccaatgcgaagaatgcctcgttctattacgctatatttgatgcattcaagagaacgttgcagatgcgtaacagcaatgcagcgactgaagaagattatattttgtcgcctgttgtttgcaacggcaagcaattctgcaccacggacgaagtcaataagggtaaggatgctgatggaaactggctatccaaactccctgttgatgctgatgccaatggtgcctatcacatcgccctcaaggggctttacctcttaaataaccctcaaacaaagaagatagaaaatgaaaaatggttccaattcatggttgaaaagccctacttagagtaa

SEQ ID NO: 436 - protein, 1291 aa, unidentified
MNTMTQRSPVSGGKNPEGQKSVFDSFTHKYALSKTLRFELVPQGKTSESLKAVFEEDKKVEENYQKTKVRLDQLHRLFVQASFTESKVSALKLASFVRAYNALIGVAKKTQTKEQKSAYEKERKALLYEVAGLFDEMGDEWKAQYEEIESVGRTGKQKKIKFSSTGCKILTDEAVLNILMDKFAEDTQVFSTFFGFFTYFGKFNETRENFYKSDGTSTAVATRVVENLEKFLRNKHIVESEYKKVKTAIGLTDSEILALTDVEAYHRCFLQAGIDVYNTVLGGSTELEQSVNKKVNEYRQKTGNKISFLAKLHNQILSEKDVFEMLVIKGDAQLWEKLKVFSEENVAYCTKMLALIRDALTMPEKSGYEWSKIYFSSGAINTISSKYFTNWSVLKGALLDAVGTAKGGGGELPDFVSLQHVQNALDVNEINKGKKPSELFRSEILKHAAFVESVGHFTNLITILLSELDARVAESAVDLADLKKDSFWTTGALSQRRKEKEDEGTIQINRISAYLNSCRDAHRMIKYFATENRRDWVEPEEGYDPKFYDAYREEYAKDIFFPLYNVARNFLTQKPSDENKVKLNFECGTLLSGWDKNKEQEKLGIILRKDGAYYLAIMRKQFSDILEEKKHPEAYRAGDNGYSKMEYKLFPDPKRMIPKVAFAETNKKTFGWTPEVQAIKDEYAKFQESKKEDQSAWKNQFDANKTARLIAYYQNCLAKGGYQETFGLTWKKPEEYVGIGEFNDHIAQQNYKIKFVPVDADYIDEHVAKGEMYLFKIKSKDFASGSTGTKNVHSLYFSQLFSEANLAQTPTVVQLAGNAEIFYREASVEPEKEKRNFPRDITKYKRFTEDKVFFHVPIKINAGTDAMRSQYQFNKILNAELIAKRAKDFCIIGIDRGEKHLAYYSVINQKGVIVDEGSLNEISGTDYHKLLDGKEKERTANRQAWLPVRQIKDLKRGYVSHAVKKICDLAIEHNAIIVLENLNMRFKQIRSGIEKSVYQQLEKQLVDKLGHMVFKDRPELEIGGVLNGYQLAAPFESFKDMGNQTGIVFYTEAAYTSTTDPVTGFRKNVYVSNSATKEKLEKAIKSFDAIGWNEERQSYFITYDPVRLVDKKEKTKTISKLWTVYADVPRIRRERNEQGVWNARNVNPNDMFKSLFEAWNFEDKIATDLKSKIEEKMKNGELSSYKMIDGRERNFFQAFIYIFNIILDIRNSSDKTDFIASPVAPFFTTLNAPKPNPCDINLANGDSLGAYNIARKGIITIGRINDNPEKPDLYISKEQWDEWATKHGIQL

SEQ ID NO: 437 - protein, 1280 aa, unidentified
MNKFTNLYSVDITLRNSLIPIGETLENMTQRSYIEHDEQRAEAYKLVKGIIDDYHRAFIDSRLAHFELRVNSRGAFDSIEEFATLYNIRRDKKRDKEFTTVKKNLRKAISQQLTKCDAYGRIDKRELIREDLPYFIDSLDISEDEKEEKKKQVEQFAKFATYFSNFHTNRANMYVADEKSTSIAYRLINQNLPVFLDNMKVFAMLKAIGFEDELDAIYSDMEEKLNVQSLDELFQQDYYSMLLTQRQITVYNEVIGGRSEKDGKKVKGLNEYINSHNQDHPTARLPFLRPLYKQILSDRVSMSWLPEAFVSDEEMIHAINIFHQNIHPLLWGPMDDAGEPLKNILSQIDTFDTEHIFITNDSALTNISQRLFGQYNLITDALLKRLSQQTPRKRGRKPESDEAYEERIRKAFKAIKSFSIAEINESLKSYMEEETYKDVSSYFRAMDERNDEHVQQANIFNRIEHAYTEAKPFLNKQRASNSPYNQDDDAIKCIKALLEAYKTLQRFINPLVGSGEESSKDDMFYGEFMPIVEELKNITPLYNKVRNWLTRKPYSTEKFKICFDNSSFLSGWPQDYETKGGYIAEHNGLYYLFINEVRLNENQIGFLCDHPDEDNASRILLDFQKPDYRNIPRFFIRSKGDNFAPAVEKYGLPIASVIDIYDQGRFETEYRSINSDDYYRSLHKLIDYFKLGFTRHESYKHYTFQWKPTNEYNDISQFYHDVEVSCYQLKRIPINWNHLLELVRQGAVYLFQIYNKDFSTQSKGKGTPNLHTLYWRMLFDERNAQNLVYKLNGQAEIFFRHASIKPENKVVHKANRPIENKNPLRKPVKPNSSFPYEITKDKRYTLDHFEFHVPITMNFKSPGINNVNPIVIDKIRKGEITHVIGIDRGERHLLYLSLIDLKGKIIHQMTLNTISNQWAEGKIDTDYQKLLGQKEGNRLEARRNWKTIENIKELKEGYLSQAIHLIAQLMVENKAIVVLEDLNFGFMRGRQKVEKQVYQQFEKMLITKLNYYVDKKKDADALGGLLHALQLTNKFESFEKLGKQSGFLFYVPAWNTSKIDPVTGFVNLLNLHYETREKASLFFSKFERISFNEEKNWFEFVLDYGKFTTKAEGTRTAWTLCTFGERIETFRDPQANHQWGNRIMNLTQAFKDFFRDSNIDIYGNLKDQICSQQKAKFFEQLLHLMKLLLQMRNSKKDSTSPEDDYILSPVADDNGVFYDSRHSSESLPNDADANGAYNIARKGLWIIRQIQSASADERPSLTLSNKEWLHFAQTKPYLND

SEQ ID NO: 438 - protein, 1249 aa, unidentified
LRKILHRHSFIFVAEIIKTHIMENLKKFTNLYSKPITLRFSAEPIGNTGKNFRDNILQKDKDLDESYQEAKLIIDNYHRWHIDTVLKRTNLDENKLLEFYAIYTDKRYKDRDKLLASLQKGFRKVLSDSLLHNEKDLFGEKLITSLIPQWLELCGNKEALEVISKFNKFTTYFTGFNTNRKNIYTEEEKKNSITYRLIHENLLKFIDNINLFERIKETEVANNFDTIKNEAKLNIQLEEVFTITYFNKLLTQSGIDLFNLIIGGYSTEKRVKYKGLNEYINEYNQTHAGNQLPKFRPLFKQILSEKDSTSYIDKQFADSKDVIIAINQSYDAINTYVLPHLTQVLSLITPEKLSLIYIENGADITRISNELCGNYDFIKQHFIKEFELQRPRTSKETIEKYYEKINKAWSKDKFVTLEYINTILRQNNKEDIISYFTKERLATTLKKIEEAYKKFQSILTVDYNGELKSDKESVSLIKDLLDSIKDLQLFIKPLSKGEFETQKDNNFYNEFIPIYSVLNDNISHLYDRVRNYVTQKPYSTEKIKLNFENSTLMSGWDVNKEPDNTTIILRKDGFYYIGIMDKKSNKCFSSKNLPSEGECYEKMEYKLLPGANKMLPKVFFSKSRIEEFAPNPQLLRAYEKGTHKKGVGFRIEDCRNLIDFFKISIEKHNDWKQFNFRFSPTNSYQDISDFYREVEHQGYKITFRNISQSYIDALVAEGKLYLFRLYNKDFSQYSKGQPNLHTMYWKMLFDEDNLANVMYALNGGAELFFRPASLERKITHPANEPIACKSVENKGKASTFKYDLIKDKRYTQDTFQFHVPITLNFKGRGINTPKGFNEHINKYYLPHATHIIGIDRGERNLLYISVIDMNGRIVEQFSLNDIVNEYNGKQYHTDYHHKLDDREKARAKARESWQSIENVKELKEGYLSQVVHKIVQLVLKYNAIIVMEDLEKAFKNNRLKIEKSVYQKFEDALINKLSYIVDKTAGKENVCGLLNALQLAYIPQKKNDIINQCGIIFYIPAWCTSKIDPVTGFINKIDTRYTSIEKAKELIGKFADICYDDENECFEFKIEDYTKLGGIDDTRKDWVLTSRGMRIETVLNPTTQKYSEQVEINLTDEFMKLLQGGIGTNLKDYILHQDNSKFFKDLLRCIKLMLQMRNSKIGTDIDYLISPVKQDNGEFYSSKEEKQKGTDSCGQWKSTLPIDADANGAYNIARKGLMVANKLKSGSIPKEAFAVSNKDWLNFVQQNNV

SEQ ID NO: 439 - protein, 1312 aa, unidentified
MFEKLSNIVSISKTIRFKLIPVGKTLENIEKLGKLEKDFERSDFYPILKNISDDYYRQYIKEKLSDLNLDWQKLYDAHELLDSSKKESQKNLEMIQAQYRKVLFNILSGELDKSGEKNSKDLIKNNKALYGKLFKKQFILEVLPDFVNNNDSYSEEDLEGLNLYSKFTTRLKNFWETRKNVFTDKDIVTAIPFRAVNENFGFYYDNIKIFNKNIEYLENKIPNLENELKEADILDDNRSVKDYFTPNGFNYVITQDGIDVYQAIRGGFTKENGEKVQGINEILNLTQQQLRRKPETKNVKLGVLTKLRKQILEYSESTSFLIDQIEDDNDLVDRINKFNVSFFESTEVSPSLFEQIERLYNALKSIKKEEVYIDARNTQKFSQMLFGQWDVIRRGYTVKITEGSKEEKKKYKEYLELDETSKAKRYLNIREIEELVNLVEGFEEVDVFSVLLEKFKMNNIERSEFEAPIYGSPIKLEAIKEYLEKHLEEYHKWKLLLIGNDDLDTDETFYPLLNEVISDYYIIPLYNLTRNYLTRKHSDKDKIKVNFDFPTLADGWSESKISDNRSIILRKDGYYYLGILEDNKLFNNIKSNSLKNYYEIMRYNLFPDAAKMIPKCSISKKEVKNHFENGVDKSIYLDNQFVSPLEISKELYELQNNLVDGKKKYQIDYLRNTDDEVGYKNALVQWITFCKDFLLKYQGTQDFDYSELKEAKYYDKLDQFYADVDSCGYNLDFDNIDEDLVNKAVEDGKLLIFQIYNKDFSPESKGKKNLHTLYWLSMFSEENLRTRKLKLNGQAEIFYRKKLEKKPIIHKEGSILLNKIDKEGNTIPENIYHECYRYLNKKIGREDLSDEAIALFNKDVLKYKEARFDIIKDRRYSESQFFFHVPITFNWDIKTNKNVNQIVQGMIKDGEIKHIIGIDRGERHLLYYSVIDLEGNIVEQGSLNTLEQNRFDNSTVKVDYQNKLRTREEDRDRARKNWTNINKIKELKDGYLSHVVHKLSRLIIKYEAIVIMENLNQGFKRGRFKVERQVYQKFELALMNKLSALSFKEKYDEGKNLEPSGILNPIQACYPVDAYQELQGQNGIVFYLPAAYTSVIDPVTGFTNLFRLKSINSSKYEEFIKKFKNIYFDNEEEDFKFIFNYKDFAKANLVILNNIKSKDWKISTRGERISYNSKKKEYFYVQPTEFLINKLKELNIDYENIDIIPLIDNLEEKAKRKILKALFDTFKYSVQLRNYDFENDYIISPTADDNGNYYNSNEIDIDKTNLPNNGDANGAFNIARKGLLLKDRIVNSNESKVDLKIKNEDWINFIIS

SEQ ID NO: 440 - protein, 1274 aa, unidentified
LFNLYSCLTEYILMQITIFTNKNKRNKNNMENSNLFTNKYQVSKTLRFRLEPTGGTDDLLRQAQIIEGDERRNKEAITMKQILDNCHKQIIERVLSDFNFKEHSLEEFFKVYTRNDDDREKDIENLQSKMRKEIADAFTKQDVTKLFSSKFKDFVERGLIKYASNEKERNIVSRFKGFATYFTGFNTNRLNMYSEEAKSTAISFRLINQNLIKFIDNILVYKKVSQTLPSDMLSNIYIDFKAIINTSSLEEFFSINNYNNILTQKQIEIFNAVIGGKKDKDEKIITKGFNQYINEYNQTNKNIRLPKMMRLFNQILSDREGVSARPEPFNNANETISSVRDCFTNEISKQITILSETTSKIESFDIDRIYIKGGEDLRALSNSIYGYFNYIHDRIADKWKHNNPQGKKSPESYQKNLNAYLKGIKSVSLHSIANICGDNKVIEYFRNLGAENTVDFQRENVVSLIDNKYNCASNLLSDAQITDEELRTNSRSIKDLLDAVKSAQRFFRLLCGSGNEPDKDHSFYDEYTPAFEALENSINPLYNKVRSFVTKKDFSTDKFKLNFDSSSFLSGWATKSEYEKSSAFIFIRDNQYYLGINRCLSKEDIAYLEDSTSSSDAKRAVYLFQKVDAKNIPRIFIRSKGSNLAPAVNEFQLPIETILDIYDNKFFTTSYQKKDRTKWKESLTKLIDYYKLGFSQHKSYADFDLKWKASSEYNDINDFLADVQKSCYRIEFININWDKLIEFTEDGKFYLFRIANKDLSGNSTGLPNLHTIYWKMLFDESNLKDIVYKMSGNAEVFMRYNSLKNPIVHKAGVEIKNKCPFTEKKTSIFDYDIIKDRRYTKDQLELHVPILMNFKSPSAAKGNVFNKECLEYIKNNGIKHIIGIDRGERNLLYMVITDLDGNIVEQKSLNQIASNPKLPLFRQDYNKLLKTKADANAQARRDWETINTVKEIKFGFLSQIVHEIAMSIIKYDAIVVLENLNRGFMQKRGLENNVYQKFEQMLLDKLSYYVDKTKHPEEAGGALHAYQLSDTYANFNSLSKNAMVRQSGFVFYIPAWLTSKIDPVTGFASFLKFHRDDSMATIKSTISKFDCFKYDKECDMFHIRIDYNKFSTSCSGGQRKWDLFTFGDRILAERNTMQNSRYVYQTVNLTSEFKNLFATKDIDFSGNLKDSICKIEDVGFFRKLSQLLSLTLQLRNSNAETGEDFLISPVADKDGNFFDSRNCPDSLPKDADANGAYNIARKGLMLVEQLKRCKDVSKFKPAIKNEDWLDYVQR

SEQ ID NO: 441 - protein, 1245 aa, unidentified
LQHTKKRIVMANFENFTNLYSISKTLRFELRPDEKTQENIKKHGLLQEDTHRADSYKKVKKIIDEYHKDFIEKSLSSCVLKIESDGKKDSLQEYCELYKKKDKSDSDKKALEKIQEQLRKQIVKSFSDRDEFKKITKKELITDLISGFLDNENKRELVEEFKSFTTYFTGFNENRKNMYSNEEKSTAIAFRLIHENLPKHMDNVSIFERLKTSKVSEDFALLSKELKEELQGKSLEDFFLIESYTKLLSQSQIDNYNALIGGKSLEKNKKIKGLNEYINLYNQKQKESKDRLPKLKMLYKQILSDRGVLSWLPKTFNSDKELLEKIEECRREFTTNEDGKGSLLEKIKQLIISLDKYDSNRIYIRNDKQITNISQKVFGGYGIIYGGLRLLLKKDTPKKKNENNEKYEERLEKRIKALDSVAISTIEEGVDTLELEDRNTILDYFKQNIEILFENIEKNYSIVKDLLNVEYPKERNLRQDKVNIEKIKNYLDSLKSLQNFIKPLCGKGNEAEKDEKFYGEFTLLWDEFNKITQLYNMVRNYITQKPYSEEKIKLNFQNSTLLNGWDLNKERDNTSVLLRKDGLYYLAIMNKDHNKVFDIKQTKEKNSGECYEKIEYKLLPGPNKMLPKVFLSTKGIAEFNPSEELLSNYQKETHKKGDNFKIEDCHALIDFFKTSIEKHKDWKQFGFVFSDTKSYENLSGFYREVEHQGYKITFRNIAVDYIDSLIEEGKIYLFQIYNKDFSPHSKGTPNLHTLYWKMLFEKENLSNVVYKLNGEAEVFFRKKSLSNNKPTHRANEPIDHKNKRNGDYKSMFPYDLIKDKRYTIDKYQFHVPITINFKSENINYINDRVNQYIRKSKDLHIIGIDRGERHLLYISVVDLQGNIKCQKSLNIINNYDYQGKLTEREKERDEERRSWQTIEGIKDLKEGYLSQAIHEISNLILKYNAIVVLEDLNFGFMRGRQKFEHSVYQKFEKMLIDKLNYLADKKKEPEEIGGLLKAYQLTNQFKSFKELGKQSGILFYTQAWNTSKIDPVTGFVNLFDTRYSNTKNAQRFFNNFEDIRFNKDKGYFEFEFDYDKFTTKAEGTKTKWTICTFGNRIETFRNKEKNSQWDSVEIDLTQKFKDLFEEKKIDLENLKAEIVKQDSKEFFEKLLRLFCLTLQLRNSISNTDVDYIISPVANENGVFYNSKECDESLPQDADANGAYNIARKGIMIVERIKANKKGKKLDLAISNKDWLKFAQEKPYRK

SEQ ID NO: 442 - protein, 1188 aa, unidentified
MNIYENFTNMYQVNKTIRMGLKPICKTDENIAKFLEEDKERSEKYKIAKKIIDKENRAFIEDRLKDFSISGLDEYLELLKQKKDITKIQKKMRDEISKQLKGFPQFDSKYKFQYITDKEDTEILEYFKKFTTFFTGFNSNRENVYSKEDISTSIGHRIIHENLPKFISNFRILNKAIEALGTGKINEDFKNNEINVTVEELNKIDYFNKVLTQSGIDLYNNLIGILNQNINLYNQQQKVKKNKIGKLETLHKQILSEKDKVSFIEEFAEDNQLLKCIDEYFKEKSCLINVDLKNLLENIDTYSLNGIFIKNDKSLKNISIYLYKDWGYISNLINEEYDYKHKNKVKDDKYYEKRKKAIDKIKYFSIGYIDELLKDKNVPMVECYFKEKINLVVKEFNASLNKFNEYKFTNELKTDEIAVEIIKNLCDSIKKIQGIIKPLIITGNDKDDDFYVEINYIWDELNKFDKIYNMVRNYLTKKDYIEEKIRMMFSKSSFMDGWGKDYGTKEAHIVYHDKNYYLVIVDEKLKLEDIDKLYKPGGDTVHYIYNYQSIDYRNIPRKFIYSKGNRFAPSVERYNLPIEDVIEVYNNKYYRTEYEEKNPKIYKKSLTSLIDYFKIGVNRDMDFEKFDIKLKDSNEYKNINEFYYNLETCCYKLQEEKVNFSVLEEFSYSGKIYLFKIYNKDFSKYSKGTPNLHTLYFKMLFDKENLENPIYKLSGNAEMFFRKGNLDLDKTTIHHANQPINNKNPNNRKRQSVFKYDIIKNRRYTVDKFALHMSITTNFQVYKNKNVNETVNRALKYCDDIYAIGIDRGERNLLYACVVNSRGEIVKQVPLNFVGNTDYHQLLAKREEERMNSRKNWKIIDNIKNLKEGYLSQAIHIITDFMVEYNAVLVLEDLNFRFKEKRMKFEKSVYQKFEKMLIDKLNFLVDKKLDKNANGGLFNAYQLTEKFTSFKDMKNQNGIVFYIPAWMTSKIDPVTGFTNLFYIKYESIEKAKEFFGKFKSIKFNKVDNYFEFEFDYNDFTDRAQGTRSKWTVCSFGPRIEGFRNPEKNNNWDGREIDITEEIKKLLDDYKVSLDEDIKAQIMDINTKDFFEKLIKYFKLVLQMRNSKTGTDIDYIISPVRNKQNEFFDSRKKNEKLPMDADANGAYNIARKGLMFIDIIKETEDKDLKMPKLFIKNKDWLNYVQKSDL

SEQ ID NO: 443 - protein, 1249 aa, unidentified; identical to SEQ ID NO: 131

SEQ ID NO: 444 - protein, 1246 aa, unidentified
MMETFSDFTNLYPLSKTLRFRLIPVGKTLRHFIDSGILEEDQHRAESYVKVKAIIDDYHRSYIESSLSAFELPVESMGKSNSLEEYYLYHNIRNKTEDIQNALSKVRNNLRKQIVAQLTKNEMFKRIDKKELIQNDLIDFVKNEPDANEKIALISEFRNFTVYFKGFHENRKNMYSDEEKSTSIAFRLIHENLPKFIDNMEVFAKIQNTSISEKFDAIQKELCPDSVAFVDMFKLGYFNRTLSQRQIDAYNTVISGRTTAEGEKIKGLNEYINLYNQQHKQEKLPKMKLLFKQILSDRESASWLPEKLENDKQVVGALVDFWNAIHDTVLAEGGLKTVISSLVSYSLEGIFLKNDLQLTDVSQKATGSWSKIPAAIKQKLEAMNPQKKKESYEGYQERIDKIFKSYKSFSLAFINECLHGEYKIEDYFIKLGAINTDLLQKENHFSHILNTYTDIKEVIESYSESTDTKLIRDNGSIQKIKQFLDAVKDLQSYVKPLLGNGDETGKDERFYGDFVEYWNQLDSITPLYNMVRNYVTQKPYSIEKIKINFQNPTLLNGWDLNKETDNTSVILRRDGKYYLAIMNSKFRKVFLKYPSGSDRNCYEKMEYKLLPGANKMLPKVFFSKSRIQEFMPDERLLSNYEKGTHKKTGNCFSLTDCHALIDFFKKSLNKHEDWKNFGFKFSNTSTYTDMSGFYKEVENQGYKLSFKPVDAVYVDQLVDEGKIFLFQIYNKDFSEHSKGTPNMHTLYWKMLFDETNLGDVVYKLNGEAEVFFRKASIKVSSPTHPANVPIKKKNPKHKDEERLLKYDLIKDKRYTVDQFQFHVPITMNFKSDGNGNINQKVVEYLRSASNIHIIGIDRGERNLLYLVVIDGSGKICEQFSLNEIKVEHNGETYSTNYHDLLDIKENERKQARQSWQSIANIKELKEGYLSQVIHKISELMVKYNAIVVLEDLNTGFMRGRQKVEKQVYQKFEKMLIEKLNYLVFKKQPSDSCGGLMHAYQLTNKFEGFNKLGKQSGFLFYIPAWNTSKMDPMTGFVNLFDLKYESIDKAKSFFSKFDSIRYNVERDMFEWKFNYDEFTKKAEGTKTNWTVCSYGNRIITFRNPNKNSQWDNKEINLTENIKLLFERFGIDLSSNLKDEIMQRTEKEFFIELISLFKLVLQMRNSWTGTDIDYLVSPVCNEKGEFFDSRNVDKALPQNADANGAYNIARKGLILLDRIKESTSDKKLNFSITNKEWLSFVQGCCKNG

SEQ ID NO: 445 - protein, 1302 aa, unidentified
MPNISEFSEHFQKTLTLRNELVPVGKTLENIISSNVLINDEKRSEDYKKAKEIIDSYHQEFIEKSLSSVTVDWNDLFSFLSRKEPEDYEEKQKFLEELESIQLEKRKSIVNQFEQYDFGSYTDLKGKKTKELSFESLFKSELFDFLLPNFIKNNEDKKIISSFNKFTSYFTGFYENRKNLYTSAPLPTAVAYRIVNDNFPKFISNQKIFRVWKDNVPKFVEIAKTKLREKGISDLNLEFQFELSNFNSCLNQTGIDSYNELIGQLNFAINLECQQDKNLSELLRKKRSLKMIPLYKQILSDKDSSFCIDEFENDESAINDVISFYKKAVCENGPQRKLSELLRDLSSHDLDKIFIQGKNLNSISKNLFGGKNWSLLRDAIIAEKSKDKSYKKAIKTNPSSDDLDRILSKDEFSISYLSKVCGKDLCEEIDKFIKNQDELLIKINSQAWPSSLKNSDEKNLIKSPLDFLLNFYRFAQAFSSNNTDKDMSLYADYDVSLSLLVSVIGLYNKVRNYATKKPYSLEKIKLNFENPNLATGWSENKENDCLSVILLKNQIYYLGILNKSNKPNFSNGISQQPSSESCYKKMRYLLFKGFNKMLPKCAFTGEVKEHFKESSEDYHLYNKDTFVYPLVINKEIFDLACSTEKVKKFQKAYEKVNYAEYRQSLIKWISFGLEFLSAYKTTSQFDLSNLRKPEEYSDLKEFYEDVDNLTYKIELVDLKEEYVDSLVENGQLFLFEIRNKDFAKKSSGTPNLHTLYFKSIFDPRNLKNCIVKLNGEAEIFYRKKSLKIDDITVHQKGSCLVNKVFFNPDSGKSEQIPDKIYNNIYAYVNGKSTTLSKEDEFFYTKATIKKATHEIVKDKRFTVDKFFFHCPITINYKSKDKPTKFNDRVLDFLRKNEDINIIGIDRGERNLIYATVINQKGEIIDCRSFNTIKHQSSSVNYDVDYHNKLQERENNRKEEKRSWNSISKIADLKEGYLSAVIHEIALMMVKYNAIVVMENLNQGFKRIRGGIAERSVYQKFEKMLIDKLNYFVIKNENWTNPGGVLNGYQLTNKVSTIKEIGNQCGFLFYVPAAYTSKIDPSTGFVNLLNFNKYNNSDKRRELICKFYEICYVQNENLFKFSIDYGKLCPDSKIPVKKWDIFSYGKRIVKEDLKTGYMKENPEYDPTEELKNLFTLMRVEYKKGENILETISIRDMSREFWNSLFKIFKAILQMRNSLTNSPVDRLLSPVKGKDATFFDTDKVDGTKFEKLKDADANGAYNIALKGLLILKNNDSVKTDKELKNVKKVSLEDWLKFVQISLRG

SEQ ID NO: 446 - protein, 1251 aa, unidentified
MKRLIDFTNIYQRSKTLRFRLEPIGKTADYIKVSQYLETDERLAKESKKVKELADEYHKEFIGDVLSSLELPLSKINELWDIYMSNDTDREIKFKKLQENLRKVIAEAFSKDKRFGSLFKKEIITDILPKFLQDKDDDIKIVNRFKGFTTYFYAFHKNRENMYVSEEKSTAIPYRIVNQNLVKYFDNYKTFKEKVMPLLKDKNIVESIERDFKDILNEKSIEDVFGLANFTHTLCQADIEKYNTLIGGLVVKNEKKEIKGINQYINEHNQTSKKGNGIPKLKPLFNQILSDRKSLSFTLDDIKKTSEAIRTIKDEYENLRDKLATIERLIKSIKEYDLAGIYIKMGEDTSTISQHWFGAYYKIIEAIADAWERRNPKKNRESKAYSKYLSSLKSISLQEIDDLKIGEPIENYFATFGTTCSDRTSGVSSLNRIEAAYTEFVNKFPEGFEDGDDCNDAYFKANVEVVKNLLDSIKDFQRFVKPLLGNEDERDKDEAFYGEFVPTYTDMDNIITPLYNRVRNFATKKPYSTDKIKINFEKSTLLTGWANYKQYGGVLFCKNDSDFYLGIVKSSKTEIHTVDDSASDIYRIDYALIPNPGKTIPCLMFRDEVKAEKVNGRKDKRTGENLRLEEEKDKYLPAEINRIRKSRSYLKSSECYCNQDMVAYIDYYKKCCISYYDKLSFTFKDSSMYSDWNDFIADVDGQGYQLNRIPVSMQELENLVDNGNMLLFRIANKDFSPNSKGRPNLHTIYWRMLFDPANLKDVVYQLNGNAEIFFRKASITRTEPTHPANVAIKNKSEYNKQNKPYSTFKYGLIKDRRYTTDQFEFHVPITMNFKQPESSKLQDKLNKQVLDFLKQDGVRHIIGIDRGERNLLYLVMVDMEGKIKKQISLNEIAGNPKNSEFKQDFHALLREREGDRLESRRSWNTIQSIKDLKEGYMSLVVHEIANMMLENDAIVVLENLNRSFMQKLGGREKSVYQKFEKMLIDKLGYIVDKTKDVSDNGGALHAVQLADTFENFNKTQKGAIRQCGFIFYIPAWRTSKIDPVTGFVPMLRCQYESIVASKDFFGKFDSIYYDATGKYFVFQTDFTKFNTESKGGIQKWDICTYGDRIYTPRTKDRNNSPVSERVNLTEAMKSLFVLHNINIQGDIKAGIMQQTDKAFFESLHRLLRLTLQIRNSKKSTGENYEDYIISPVMGKDGRFFDSRNADATQPKDADANGAYNIARKGLMLLRQIQAQEKQDLSNGKWLEFAQR

SEQ ID NO: 447 - protein, 1272 aa, unidentified
MIIYNCYIGGSFMKKIDSFTNCYSLSKTLRFKLIPIGATQSNFDLNKMLDEDKKRAENYSKAKSIIDKYHRFFIEKALSSVTENKVFDSFLEDIRAYAELYYRSNKDDSDKASMKTLESKMRKFIALALQSDEGFKDLFGQNLIKKTLPEFLESDADKEIIAEFDGFSTYFTGFFNNRKNMYSADDQSTAISHRCINDNLPKFLDNVRTFKNSDVANILNNNLKILNEDFDGIYGTSAEDVFNVDYFPFVLSQKGIEAYNSILGGYTNSDGSKIKGLNEYIYLYNQKNGNIHRIPKMKQLFKQILSERESVSFIPEKFDSDDDVLSSINDYYLERDGGKVLSIEKTVEKIEKLFSAVTDYCTDGIFVKNAAELTAVCSGAFGYWGTVQNAWNNEYDALNGYKETEKYIDKRKKAYKSVESFSLADIQKYADVSESSETNAEVTEWLRNEIKEKCNLAVQGYESSKDLISKPYTESKKLFNNDNAVELIKNALDSVKELENVLRLLLGTGKEESKDENFYGEFLPCYERICEVDSLYDKVRNYMTQKLYKTDKIKINFSNSHFLSGWAQTYSTKGALIVKKENNYYLVIVDKKLSNDDIVFLGTNTQLSPAERIVYDFQKPDNKNTPRLFIRSKGTSYAPAVKEYDLPISDIIEIYDNEYFKTEYRKINPKGYKEALIKLIDYFKLGFSRHESYRCFNFKWKESEQYSDISEFYNDVVKSCYQLKSESINFDSLLKLVDEGKLYLFQLYNKDFSEHSKGTPNLHTLYFKMLFDERNLENVVFKLNGEAEMFYREASISKDDMIVHPKNQPIKNKNEQNSRKQSTFKYDIVKDRRYTVDQFMLHIPITLNFTANGGTNINNEVRKALKDCDKNYVIGIDRGERNLLYICVVDSEGRIIEQYSLNEIINEYNGNTYSTDYHALLDKKEKERLESRKAWKTVENIKELKEGYISQVVHKICELVEKYDAVIVMEDLNFGFKQGRSGKFEKSVYQKFEKMLIDKLNYFADKKKSPEEIGSVLNAYQLTNAFESFEKMGKQNGFIFYVPAYLTSKIDPTTGFADLLHPSSKQSKESMRDFVGRFDSITFNKTENYFEFELDYNKFPRCNTDYRKKWTVCTYGSRIKTFRNPEKNSEWDNKTVELTPAFMALFEKYSIDVNGDIKAQIMSVDKKDFFVELIGLLRLTLQMRNSETGKVDRDYLISPVKNSEGVFYNSDDYKGIENASLPKDADANGAYNIARKGLWIIEQIKACENDAELNKIRLAMSNAEWLEYAQKK

SEQ ID NO: 448 - protein, 1301 aa, unidentified
LLPARRCNGAVPHIRHTDNHATPGHSMSLDSFTRKYKLAKTLRFELRPVGRTLETFRSKFLPGDERRAAAYPGAKEMLDNEHKALLERALANPPAGLDWSGLAQAHDTYRTSDKSKAAKGALAARQAVFRKALADHLTKDPSYKTLTAATPKDLFKALKARCEEAGQPVPGDLQTFLRFSCYFKGYQENRRNIYSDKAQATAAANRAVNGNFPRFLEDVRIFRHIAERYPQIPADAARELAPLLEGRTLDSIFTPAAYNGFLAQSRIDFFNSVLGGFVPAEGEKTRGINEFVNLYRQRHEDAREDRALAPLRPLHKQILSDRESHSLVPRMFENDGAVVSAIREMLDKRLLALETENGTENVPDALQSLLATLSPSPAIWIDGAEITRVSKDLLGSWNALSILMEAAAEIRFASESTEKKRDAAVANWMKKPVFSLAEMGGLRVDTDNGANPVDVSGLWKGPVAAARFDAVRKAVAEVRPVLDSAPSGEGTPLRERQEDIARIKAALDAILDLLRFVKPLRAGGELDRDEAFYGAFDPLFDALDGFVPLYNKVRNYLTRKPGETGSVKLMFDNPSFLEGWEQNLETKRTSILFFRDGFYYLGVMAPDAKINFSAFAVSAASGCYRKVVYKAISKAAQYFSIKQIKPQNPPQFVLDWLAKGFDKKTLHRDQLTRLISYVMDDFIPNYPPLKDGSGRVAFDFSFRKPSEYGSWKEFTDHIASMAYKISFEDIPAEAVDRLVEEGKLCLFLLWNKDFSQASNGRPNLHTMYWKAVFSPENLRDVVIKLNGEAEVFYRPKSIRTPFRHKVGEKMVNRRGRDGAPVPEAIHGELFRHANGDTAPLSGAARQWLESGNLVVKEVTHEIVKDARFAADKFSFHVPVTINFKQPDVSARFNDQVRAFLRANPDVKVIGIDRGERNLLYLALVDREGNLLEQRSFNTVSRTRKDGVVTPTDYQAKLVQSEKDRAEARASWAEIGAIKDLKAGYLSAVVHEIAEMMVKHNAIVVLEDLNFGFKRGRFRIERQVYQKFEKALIDKLNYLVFKDRGMEEPGGTLRGYQLTDAFESFEKIGKQTGFLFYVPAGYTSKIDPTTGFTNLFNTKKCTNAAGIRDFFAAFDAIRWDAARRVFAFSFDYRNFKTSQESHRTKWTVYSADRRLAFDKESRSEREINPTAILLGALEERGIAVADGFDLKALLLATEPSKANAAFFRSVFYAFDRTLQMRNSRAEEDYIHSPVLNARGGFFDSREAGDALPREADANGAYHIALKGVQLLEENLAAETPNLKIEHKDWFRFAQELAERKFR

SEQ ID NO: 449 - protein, 1305 aa, unidentified
MNKAADNYTGSNYDEFIALSKVQKTLRNELKPTPFTAEHIKQRGIISEDEYRAQQSLELKKIADEYYRNYITHKLNDINNLDFYNLFDAIEEKYKKNDKENRDKLDLVEKSKRGEIAKMLSADDNFKSMFEAKLITKLLPDYVERNYAGEDKEKALETLTLFKGFTTYFKGYFDIRKNMFNGEGGASSICHRIINVNASIFFDNLKTFMRIQEKAGDEIALIEEELTEKLDGWRLEHIFSRDYYNEVLAQKGIDYYNQICGDINKHMNLYCQQNKFKANIFKMMKIQKQIMGISEKAFEIPPMYQNDEEVYASFNEFISRLEEVKLTDRLRNILQNINIYNTAKIYINARYYTNVSSYVYGGWGAIDSAIERYLCNTIAGKGQSKVKKIENAKKDNKFMSVKELDSIVAEYEPDYFNAPYIDDDDNAVKAFGGQGVLGYFNKMSELLADVSLYTIDYNSDDSLIENKESALRIKKQLDDIMSLYHWLQTFIIDEVVEKDNAFYAELEDICCELENVVTLYDRIRNYVTKKPYSTQKFKLNFASPTLAAGWSRSKEFDNNAIILLRNNKYYIAIFNVNNKPDKQIIKGSEEQRLSTDYKKMVYNLLPGPNKMLPKVFIKSDTGKRDYNPSSYILEGYEKNRHIKSSGNFDINYCHDLIDYYKACINKHPEWKNYGFKFKETNQYNDIGQFYKDVEKQGYSISWAYISEEDINKLDEEGKIYLFEIYNKDLSAHSTGRDNLHTMYLKNIFSEDNLKNICIELNGEAELFYRKSSMKSNITHKKDTILVNKTYINETGVRVSLSDEDYMKVYNYYNNNYVIDTENDKNLIDIIEKIGHRKSKIDIVKDKRYTEDKYFLYLPITINYGIEDENVNSKIIEYIAKQDNMNVIGIDRGERNLIYISVIDNKGNIIEQKSFNLVNNYDYKNKLKNMEKTRDNARKNWQEIGKIKDVKSGYLSGVISKIARMVIEYNAIIVMEDLNKGFKRGRFKVERQVYQKFENMLISKLNYLVFKERKADENGGILRGYQLTYIPKSIKNVGKQCGCILYVPAAYTSKIDPATGFINIFDFKKYSGSGINAKVKDKKEFLMSMNSIRYINEGSEEYEKIGHRELFAFSFDYNNFKTYNVSSPVNEWTAYTYGERIKKLYKDGRWLRSEVLNLTENLIKLMEQYNIEYKDGHDIREDISHMDETRNADFICSLFEELKYTVQLRNSKSEAEDENYDRLVSPILNSSNGFYDSSDYMENENNTTHTMPKDADANGAYCIALKGLYEINKIKQNWSDDKKLKESELYIGVTEWLDYIQNRRFE

SEQ ID NO: 450 - protein, 1337 aa, unidentified
MTSLYPTSKTIRFKLEPIGKTSENINKNGILSADECKAKDYLKIKETIDAYHKYFIDQQLRLVKTETINKQKTGTKFFLIDGVQNVYNIYNNLKKDRKDEKNRRLFLDKCTALRKKLVSEAFPSEVIKKLTSGKLFTDILPEWVAQENTTRSNEKKLFWSDTFKRFSTYFSGFHENRENMYSGEEKSTAIAYRLINENLPRFFDNVENFGKIQNTLKEWTSIFSDKEKQLFNEKTIKSTFVLENYANCLTQSDITCYNNLICGYTSENKEKVRGLNEFINLHNQKIKDKKEKLRSFKLLYKQILSDRETVSFIPYQFTSINKLYDAINNFYLVCIVNEKDDGGENCNVFEAIEKHFKKIKDGNYDLKHIYISHRSVSSISQKVFGRYSFIKDALEYYYCTDIRPKYEEEIQKAKPSKREKIEKELDNYVNQQYLPIELVDKACEKYSKTLEDNFKHSESSAITDYCAHFLTKIISSKTYSAGKYEDERYSCIKGELNTQHDENYHPSTEVVNNIKLFMDTILESIHRLRDFIIRRDEENICEKDEHFYEFIDKLWEKLSAFINLYDKTRNYLTGKPYSTDKIRLTFNIPALADGWDENKEKDCRAFIFKKSEQYYLGIAAKSGLHFVYNDKEHNLSSCYWKMIYKYFPDPSKMIPKCTITTKDVKTHFASSDDNYELFDPKKFVKPIIISKDIYDIYFNAGPKPAFTGEFIKNGGDQKEYKNALTKWIDFSKQFLSSYSSTAVYNFDSLRPSNSYQNISEFYSEIAALTYKINFKPILSKYIDDLVQKGDLYLFRITTKDFNSTHGMPNLHTLYWRSLFSEENLVKTCIKLNGQANIFYRVPSITSPVIHKKGSILVGRTATNGKNIPEHIYTELCLIKNGKKAEKDADTETREYLTKIKIREAQYDIIKDRRFTQSTFLFHVPLTFNFGIKPSKTFEFNNKINDFLKKHDDVNIIGIDRGERHLLYVSVINRQGDILEQTTLNILNGVDYHSKLDNREKERAGARKNWGTIGRIADLKEGYLSIVIHTLVEMMIRYNAIIVMEDLNTGFKRGRFKVEKQVYQKFEKALITKLNYLCLKDIAIDKIGGILHGWQLTNPFESFKKMGHQNGIIFYIPAWNTSKIDPITGFVNVIKHKYTNRESANKFFENFKEISYKSKDDAFDFVYIDKFSGKNWIITTGGKVRYFWLKDPSGHGGSTQKVDITQKLKNCFTKNNIPWENGENIVETLTTSVNASVLKEVIWCLQRVLAMRNSSAEDGVDFILSPVRMPDGRTFCSNNAGEKLPCDANGAYNIARKGILVMEKIKAGDKNPTLIKNEDWLNYAQSEVVVAMQMKKYK

SEQ ID NO: 451 - protein, 1004 aa, unidentified
LSQSEIDSYNSKVGNLNYLVNLYYQQTKNNLPKFKSLFKQIGCGEKKDFLKTIKDNDELNDVLTKAKNLGDKYFTGGKDKETVKAFTDYLLNLDNFENIYWSDKAINTISGKYFGNFGNLKEKLIKAKIFNEDKNSGEAKVPRAVQLSDLFEVLDGQDDWDKEGVLFRENFKDNNKAKQDIIKNAQTPHEALLKMICNDIEDLSKKFIKGADEVLKIEKGDYQKDESKIAIKAWLDDALFAGQILKYWRVKAKYSIDGNFTEILDKVKVFEVVKDYDVVRNYLTQKPQNKLGKLKLNFENSSLAAGWDINKEKDNSCVILQNEHGKQYLAIMKYEETSVFEQNKKNELYMSDNSGWKKINYKLLPGPNKMLPKVLFSSKWVTNNPTPANIKKIYGKGTFKKGDNFNKNDLHILLDFYKNQLKKYPSEKESWDKIFNFDFSNTKSYESVDRFYAEVEKQGYKLEFIPVKKNKIEELVENGKIYLFEIKSKDSNLKNGKEKTSAKDLQTIYWNRIFSDIENKPKLNGEAEIFYRPALEGKNLKRKKWKNKEIIENFRFSKEKFIFHCPITLNPCLKNKRINDLVNQVIVETKNQLFLGIDRGEKNLAYYSLVNQRGEILEQGSFNIINKQNYWEKLDIKQGDRDLARKNWTTIGNIKDLKDGYISQVVRKIVDLAVYNEGDRKKGFRETPALIILEDLNIGFKRGRQKIEKQVYQKLELALAKKLNFLVDKSAKDGEMASVDNALQFTPPVHDFNDIKGKQFGIMFYTNPSFTSATDPITGWHKTISIKKGSEIKEQIFDLFSDFGFDGKDYYFKYKDANIGKEWILYSGKNGAELDRYRDKFSEKEGKKHWSPDRIDIVKNLENIFKGFDKNKSFKEQIKDGKELNKFDKERTAWESLRFVIDVIQQIRNTGEDEKDNDFILSPVRGASGDFFDSRKIKNGAKLPQNGDANGAYNIARKGIIMSEHIKRNADLFVRNEEWDAWLAGEKNWVDYMANNLKIRQKTV

SEQ ID NO: 452 - protein, 1243 aa, unidentified
MREKKSSEKLADNFIGVYPVSKTLRFELIPQGKTLEYIQRDGILDSDHHRAENYQKVKELIDRYHKIFIDEALQSIRLENLSEYERLYSAKRDEKQDREFQEIQTSLRKQIAKKFRSHSKYKNLFNKELIKKELILFLKDEPEKRSLVEEFADFTTYFTGFNANRENMYSDEAKGTAIAYRIVHENLPKFIDNMNAFKCLKESGAFLKVKDSLPSLQKKFGLDSVEYFFTIDGFTQVLSQKGIDIYNGVLGGYICEDDTKIQGLNEIINLYNQQQKGEKNRLPKLKVLYKQILSDRESNSFVLDKFENGQEVLEAVKNCYVHFYKYIFEPEEEMSLNNLINDLENFDLGKIYIANDVSITDISQYIYGDWSILRKAISEDYDRHHLSEKMTRDPEKYEDKKQKELKRRELYSIRELNRMAQEYAGTVCNIENYFILQISERLMKINHEYEACRSLLEGESEEKELYKDKNAVLKLKNLLDAMKELQLLIKPLIKGREKAEKDELFYVELVRIWDELNAVNQLYNKVRNYATQKPYSLEKVKLNFNKSTLLDGWDRNKEKDNLGVILIKDNKYYLGIMNRNSNRVMEDAPAAVSTNRYQKMEYKLLPGPNKMLPKVFFSASRIDEFAPDEELLEKYKEGTHKKGDNFSLEDCHRLIDFFKRSLKKHPEWSEFDFSFSDTETYKDISGFYREVERQGYKITFKDIDADYIEKLVEEGQLYLFQIYNKDFSPYSKGTPNLHTIYWKTLFSPDNLKDVVYKLNGQAEIFYRRKSIEEKDIICHPSNEELRNKYPKAEKPTSKFPYELTKDRRFTVDKFQFHVPITMNFKAKGENYFNRKVRRLIHNCQDMHVIGIDRGERNLLYLSVIDMQGKIKEQLPLNDIVSTNKNEVIHHKDYHLLLEKREEENKAARQDWQTINTIKELKEGYLSQAIHIIAELMLKYNAIVVLEDLNFGFMRSRQKFEKQIYQKFERMLIDKLNYLVDKKRDINENGGALRAYQLTDKFESFQKLGKQSGFLFYVPAWNTSKIDPSSGFVNLFYTKYETKEKTRDFIKKFDSIIYNEQENYFEFYFDYSNFTYKAEGSRTKWCLCTEGNRIETFRNPAKNAEWDTKEIILTEGFAGLLEKYHISWKSGEIKKAISEIEEAEFYRSFMHFMSLLLQMRNSDKKAGEDWLMSPVKNSRGEFFKTDKDSEDYPRDADANGAYNIAKKGLWIIEQIQKTEIDQLDKVKIAISNKEWLAYAQEHVL

SEQ ID NO: 453 - protein, 1333 aa, unidentified
MKNFQDFTNLYELSKTLRFELKPIGGTKKLIEEKNILKLDKKKRENYEKVKPYFNKIHQEFINFALRNPNFDFSQFEEKYLNWLKDKKNKDLLKEKESIDKIFLEKIGKLFENSVKDFLKENGFESIVKEEDQNLKFFRRKEIFEVLQEKYGSELETQMVNKDGEIKSIFNGWEKWLGYFDKFFNTRDNFYKTDGTSTAIATRIIKDNLKIFLENIVAFGKIKNKKIDFSEVEKNFSVSIDTFFEINNFNNCFLQDGIDFYNKVIGGETLENGEKLKGLNEIINKYRQDTGEKIPYFKKLQKQILSEKDGVFIDKIEDDGGFYEVLKNFYKNAAEKEGFLKNIFENFYTISDKNLEKIYFNKIAFNTISHKFGSALEFERILYEEMKKEKADGIKFEKKENKYKFPDFIQIIFIKRSLENYDSENLFWKERYYKSEENVDGFLEKNNNNLWGQFCKILNFEFLNILKRRIIDEAGEEYEVGFEISKNILGEKLENFELNQENKGIIKDFADYSLALYSFGKYFAVEKGRNWDLNIDISDDFYGGEDGYIEKFYNTGYDEIVKPYNLMRNYISKKPWEDNKKWKINFETSSLLSGWDKNLESNGSYIFQKGNKYYLGIINGSKPAKEILEKLYSGDGEKIKRFIYDFQKPDNKNTPRMFIRSKKDSFSPAVEKYNLPINDILEIYDNGLFKTENKGNPNYKESLRKLIDYFKLGFSRHESFKHFNFVWKDSKSYENIADFYRDVEKSCYKIDFEFLNFEELKKLTFEKHLYLFQIYNKDFELDESLQEKGYNFKGEGQKNIHTKYFEALFLEENISRKSGAVFKLSGGGEVFFRKKSIKAKKEKRNSVEVIKNKRYTECKYFLHFPIQVNFKEEISGNFNQEINKFLANNPDINVIGIDRGEKHLAYFSVINQKGEILESGSFNKIENYNKNGEKLLFPEREIKEIHKDGSLIDLELVETGRKVDYVDYKLLLEYKERKRLLQRQSWKEVEQIKDLKKGYISALVRKIADLIIKHNAIVIFEDLNFRFKQIRGGIEKSIYQQLEKALIDKLNFLVNKNEINLEKAGSILKAYQLTVPVDSLKEIGKQTGVIFYTEAAYTSKIDPITGWRPNLYLKKNNSKINKENILKFDNIVFNSKENRFEFTYDLKKFFGKDSKFPAKTVNTVCSCVERFKWNRNLNNNKGGYIHYENLTDGKLANKEQKEDEFSNFKELFEKYFIDINGNILEQIKNLDTKNNEKFFSSFIDLFTLVCQIRNTNQNAKGDENDFILSPVEPFFDSRKSQNFGKSLPKNGDENGAFNIARKGLIILNRISENPEKPDLLIFNADWDNFARNI

SEQ ID NO: 454 - protein, 1261 aa, unidentified
MLFQDFTHLYPLSKTVRFELKPIGKTLEHIHAKNFLSQDKTMADMYQKVKAILDDYHRDFIADMMGEVKLTKLAEFCDVYLKFRKNPKDDGLQKQLKDLQAVLRKEIVKPIGNGGKYKVGYDRLFGAKLFKDGKELGDLAKFVIAQESESSPKLPQIAHFEKFSTYFTGFHDNRKNMYSSDDKHTAIAYRLIHENLPRFIDNLQILATIKQKHSALYDQIASELTASGLDVSLASHLGGYHKLLTQEGITAYNRIIGEVNSYTNKHNQICHKSERIAKLRPLHKQILSDGMGVSFLPSKFADDSEMCQAVNEFYRHYADVFAKVQSLFDRFDDYQKDGIYVEHKNLNELSKRAFGDFGFLKRFLEEYYADVIDPEFNEKFAKTEPDSDEQKKLAGEKDKFVKGVHSLASLEQVIEYYTAGYDDESVQADKLGQYFKHRLAGVDNPIQKIHNSHSTIKGFLERERPAGERALPKIKSDKSPEMTQLRQLKELLDNALNVVHFAKLVSTETVLDTRSDKFYGEFRPLYVELAKITTLYNKVRDYLSQKPFSTEKYKLNFGNPTLLNGWDLNKEKDNFGVILQKDGCYYLALLDKAHKKVFDNAPNTGKSVYQKMVYKQIANARRDLACLLIINGKVVRKTKGLDDLREKYLPYDIYKIYQSESYKVLSPNFNHQDLVKYIDYNKILASGYFEYFDFRFKESSEYKSYKEFLDDVDNCGYKISFCNINADYIDELVEQGQLYLFQIYNKDFSPKAHGKPNLHTLYFKALFSEDNLANPIYKLNGEAQIFYRKASLDMNETTIHRAGEVLENKNPDNPKQRQFVYDIIKDKRYTQDKFMLHVPITMNFGVQGMTIEGFNKKVNQSIQQYDDVNVIGIDRGERHLLYLTVINSKGEILEQRSLNDIITTSANGTQMTTPYHKILNKKKEGRLQARKDWGEIETIKELKAGYLSHVVHQISQLMLKYNAIVVLEDLNFGFKRGRLKVENQVYQNFENALIKKLNHLVLKDKTDDEIGSYKNALQLTNNFTDLKSIGKQTGFLFYVPARNTSKIDPETGFVDLLKPRYENITQSQAFFGKFDKICYNTDKGYFEFHIDYAKFTDEAKNSRQTWVICSHGDKRYVYNKTANQNKGATKGINVNDELKSLFACHHINDKQPNLVMDICQNNDKEFHKSLMYLLKALLALRYSNANSDEDFILSPVANDEGVFFNSALADDTQPQNADANGAYHIALKGLWVLEQIKNSDDLDKVDLEIKDDEWRNFAQNR

SEQ ID NO: 455 - protein, 1238 aa, unidentified
MNNYDEFTKLYPIQKTIRFELKPQGRTMEHLETFNFFEEDRDRAEKYKILKEAIDEYHKKFIDEHLTNMSLDWNSLKQISEKYYKSREEKDKKVFLSEQKRMRQEIVSEFKKDDRFKDLFSKKLFSELLKEEIYKKGNHQEIDALKSFDKFSGYFIGLHENRKNMYSDGDEITAISNRIVNENFPKFLDNLQKYQEARKKYPEWIIKAESALVAHNIKMDEVFSLEYFNKVLNQEGIQRYNLALGGYVTKSGEKMMGLNDALNLAHQSEKSSKGRIHMTPLFKQILSEKESFSYIPDVFTEDSQLLPSIGGFFAQIENDKDGNIFDRALELISSYAEYDTERIYIRQADINRVSNVIFGEWGTLGGLMREYKADSINDINLERTCKKVDKWLDSKEFALSDVLEAIKRTGNNDAFNEYISKMRTAREKIDAARKEMKFISEKISGDEESIHIIKTLLDSVQQFLHFFNLFKARQDIPLDGAFYAEFDEVHSKLFAIVPLYNKVRNYLTKNNLNTKKIKLNFKNPTLANGWDQNKVYDYASLIFLRDGNYYLGIINPKRKKNIKFEQGSGNGPFYRKMVYKQIPGPNKNLPRVFLTSTKGKKEYKPSKEIIEGYEADKHIRGDKFDLDFCHKLIDFFKESIEKHKDWSKFNFYFSPTESYGDISEFYLDVEKQGYRMHFENISAETIDEYVEKGDLFLFQIYNKDFVKAATGKKDMHTIYWNAAFSPENLQDVVVKLNGEAELFYRDKSDIKEIVHREGEILVNRTYNGRTPVPDKIHKKLTDYHNGRTKDLGEAKEYLDKVRYFKAHYDITKDRRYLNDKIYFHVPLTLNFKANGKKNLNKMVIEKFLSDEKAHIIGIDRGERNLLYYSIIDRSGKIIDQQSLNVIDGFDYREKLNQREIEMKDARQSWNAIGKIKDLKEGYLSKAVHEITKMAIQYNAIVVMEELNYGFKRGRFKVEKQIYQKFENMLIDKMNYLVFKDAPDESPGGVLNAYQLTNPLESFAKLGKQTGILFYVPAAYTSKIDPTTGFVNLFNTSSKTNAQERKEFLQKFESISYSAKDGGIFAFAFDYRKFGTSKTDHKNVWTAYTNGERMRYIKEKKRNELFDPSKEIKEALTSSGIKYDGGQNILPDILRSNNNGLIYTMYSSFIAAIQMRVYDGKEDYIISPIKNSKGEFFRTDPKRRELPIDADANGAYNIALRGELTMRAIAEKFDPDSEKMAKLELKHKDWFEFMQTRGD

SEQ ID NO: 456 - protein, 1279 aa, unidentified
MSNFNEFTHLYQLSKTLRFELKPIGETLKHFNESGILDQDEHRAESYKKVKKLIDRYHKEFMEEALRDFVFQMDDEGKNNSLSEYFFLYSLGKRTEAQDNDFKDVKKNLREQIAKYFKASPKYKNLFKQELIKEDLCNNMQCNEEEQKLVEEFHNFTTYFTGFHENRKNMYSDEEKSTAIAFRLVHQNLPKFIDNIGVFDRVRNIDEIKAGIENLQKHFETEGLFKQGEKIEDFFTLDYYSRLAVQSRIEIYNAILGGKTTEKGEKIQGLNELINLYNQQHKETHLPKMKALFKQILSDRQAVSWIEESFKSDNEVLSSVNDFYENLKQNEIFERTKELLTSVGSYDLSKVYITNDQQLTSISQQLYGSWAVIENAILAEMQNETPRKKKEDAEKYNERLKKAYSNRSSFSIAYIDQCLEAVFGENRIPVEQHFANLGKAEIETEAECGKIKIPDVFTQIEQTYSAAKSLLCNPYPKDKHLSQSDEDIEKVKNLLDALKRFQHFIKPLTGSGDEAEKDEMFYGDLAELWTEIDQLNSLYNKVRNHLTGKPYSEEKLKLNFENATLLNGWDKNKEPDNTAIILRKDGLYYLAIMNKEHNRIFASDKLPNNGECYEKVIYKLLPGANKMLPKVFLSKKGIEVFKPSQEILAIYNNGTHKKGDTFNINDCHKLIDFFKESISKHNDWKNFDFHFSDTNSYEDLSGFYREVENQGYKITFQNISSDYIDNLVNEGKLYLFQIYNKDFSTKRDLSKHKEGTPNMHTLYWQMLFDERNLNDGVYQLNGHAEVFFRKKSLNYTKPTHPANQPIAKKNPHSKNETSQFTYDLIKDKRFTMDKFLFHVPITLNFKSGETDNINAKVRQWLQKADDVHIIGIDRGERHLLYLTVIDSKGNIKEQMSLNTIENKYNGNTYAFDYHNRLDEKEKERDKAKKSWKTVENIKELKEGYLSQAIHKITQLMLKYNAIIVLEDLNIGFMRGRQKVEKQVYQKFEKMLIDKLNYLADKKKDPSEVGGVLNAYQLTSKFESFTKLGRQSGFLFYIPAWNTSKIDPVTGFVNLFDTQYKSDGKAKMFFSKFKSISYNKDKNWFEFSFDYNDFTSKADGTKTEWTVCTNGERIENFRNGETSNQWGGRTINLSQKFKSLFDEYGIDFTKDLQNSICSQSKKGFFKQLLHLFKLTVQMRNSNTETEEEKGKKDFIISPVCVDDKYYNSDIEAEKGKDEEGNWKSELPVNADANGAYNIARKGLMILNHIKQSSDPSKKQEYDLTNKAWLNFVQKGSVEGK

SEQ ID NO: 457 - DNA, 3876 bp, unidentified
  source 1..3876: mol_type = other DNA
atgaatactatgacccaacgtagccccgttagcggcggaaaaaaccctgagggccagaagtctgtgtttgactctttcacacataagtacgcgctgtccaagacgctacgcttcgagctcgtgccacagggcaagacgtctgagagtcttaaggccgtgttcgaagaggacaaaaaagttgaagagaactatcagaagaccaaggtacggctcgaccagctgcaccggcttttcgtgcaggcatccttcactgagagcaaggtcagtgcgctgaaactcgcttcttttgtcagagcttacaatgccctgattggcgtcgcaaaaaaaacccagaccaaagaacagaaatcagcttatgagaaagaaagaaaagccctgctctatgaagtggccgggctttttgatgagatgggtgatgagtggaaggctcagtatgaagaaatcgagagcgtcgggcgaacaggaaagcaaaaaaagatcaaattctcctcgaccggttgcaagattctcaccgacgaagccgtcctgaatatcctcatggacaaattcgctgaggacacccaggtattcagcacatttttcgggttcttcacatattttggcaaattcaacgagacacgagaaaatttttacaagagcgacgggacttctactgccgtggcgaccagggttgtagaaaatctcgagaaattccttcgcaacaaacatattgtggagagcgagtataagaaagtaaaaactgccatcggactgactgattccgaaatcctggctttgaccgatgtcgaggcctatcaccgatgctttctgcaggcggggatcgatgtttacaataccgttttaggcggctcaaccgagctggaacaatcagtcaacaaaaaggtgaacgaatacaggcagaagacgggtaataagatcagttttctcgctaaactgcacaaccagattctcagtgaaaaggacgtattcgaaatgctggtgattaaaggtgatgcacagctctgggaaaaacttaaagttttttctgaggagaacgtggcatactgtaccaaaatgcttgccctaatccgcgacgctcttaccatgcctgagaagtcgggatatgagtggtcaaagatctatttttcatcaggggccataaatacgatttcttccaagtacttcacaaactggtccgtgctgaagggcgcactgctggatgctgtaggcacagctaagggcggtggcggagaactgccagacttcgtgtcactgcagcacgttcagaatgcattagacgtcaacgaaatcaataaagggaagaaaccatcagaacttttcagaagtgaaatcttgaagcacgcggcttttgttgaatcggtggggcatttcactaatcttataaccatcttgctgagcgagctggacgctcgtgtggcggaatccgcggtggatttggccgacttaaagaaggacagtttctggactaccggtgcactgtctcagagacggaaagaaaaggaggatgagggaactatccagattaataggatatctgcctacctcaactcttgtcgcgatgcacacaggatgatcaagtactttgcgactgagaataggagagactgggtcgaaccggaggaggggtacgatccaaagttttacgatgcttaccgggaagagtatgccaaggacatattttttcctctttacaacgtcgctcgcaactttttaacgcagaaaccctcagatgagaataaggttaagttgaacttcgaatgcggcaccctcttatctggctgggataagaataaggagcaagaaaagctgggaattatccttcggaaagacggagcgtactatctcgcaattatgagaaaacagttcagtgacattctggaggagaaaaaacatccagaggcctatagagccggcgacaacggttattccaagatggaatataagctgtttcccgatccgaaaaggatgatacctaaggtagcattcgccgagacgaataagaagacttttgggtggacacccgaggtccaggctatcaaagacgagtacgctaagttccaggaaagcaaaaaggaggatcagtccgcctggaaaaatcaattcgatgccaacaagaccgccaggctcatcgcatattaccaaaactgcctggctaaggggggatatcaggagacgtttggtctgacatggaagaagcccgaagagtacgtaggaataggagagtttaatgatcacattgcccaacaaaactacaaaatcaagttcgttccagtggacgccgactacattgatgaacacgtggccaaaggagagatgtacctattcaagattaagagcaaagatttcgcctcaggcagtacagggactaaaaacgtgcacagcctgtatttcagccagttgttttccgaggcaaacctagctcagactcctaccgtcgttcagctggccggtaacgcagaaatcttctatagggaagcctctgtggagcccgaaaaggagaaacgaaactttcctcgcgatatcacaaagtataagagatttacagaggataaggtgttttttcatgtgccgataaaaataaacgccggcaccgatgctatgcgttcccaatatcagttcaacaagatcctgaacgctgaattgattgctaaaagagctaaggatttctgtattattggcattgatcgtggggaaaagcatttggcctactactctgtcatcaatcagaaaggcgtgatcgttgacgagggcagtctcaatgaaattagcgggacagattatcacaagctcctggatggcaaagagaaggagcggaccgccaatcggcaagcttggctgccagtgcgccaaattaaagacctcaagcgcggctatgtcagccatgccgtgaagaaaatatgcgatcttgcaattgagcataacgcgattatcgtgctggaaaacctgaacatgcgctttaaacagataagaagcgggatcgagaagtccgtctatcagcagctggagaagcagttagtcgacaaattagggcacatggtgtttaaggacaggcctgaactggagatcggcggagtcttgaatggctaccagctcgccgccccctttgagtcctttaaggacatgggtaatcagacaggaattgtgttctacaccgaagccgcttacacaagcaccacagaccccgtgactggttttagaaaaaacgtgtatgtgagcaattcagcaactaaagaaaagctagagaaagccataaaatccttcgacgctattgggtggaatgaagagaggcaaagttactttattacctacgaccctgtgagattggtggataagaaggagaagacgaaaacaatttcgaagctatggacagtgtacgccgacgttcctcgaatccggagggagcgaaatgaacagggcgtctggaatgcacggaacgtgaaccccaacgacatgtttaagagcctgttcgaggcctggaatttcgaggacaagattgcaaccgacttgaagagtaagatcgaggagaagatgaagaatggagaattgtcctcatacaagatgattgatgggcgggagcggaatttcttccaagccttcatctacatcttcaacatcatcctagacatcaggaactcctctgacaaaacagatttcattgcaagccctgtagcaccattttttaccaccttaaatgcacccaaacccaatccgtgtgatataaacctggcaaacggagattccctcggtgcctacaatatcgcacgtaaaggaattatcactataggccgcatcaacgacaacccagagaaaccagacctgtatatatctaaagaacagtgggacgaatgggccactaagcacggaatccaactgtga

SEQ ID NO: 458-481 - skipped (24 entries)

SEQ ID NO: 482 - DNA, 3825 bp, unidentified
  source 1..3825: mol_type = other DNA
ttgttcaatttatattcttgtttaacagaatatattctgatgcaaataactatatttacaaataaaaacaaacgaaacaaaaataatatggaaaactcaaacctatttacaaacaagtaccaagtaagcaaaaccctccgctttcgccttgagccaaccggaggtactgatgatttacttcgccaagcacaaatcatcgagggagacgagcgccgcaataaagaggctataacaatgaaacagattttggacaattgtcacaaacagataattgagcgcgtattgtccgactttaattttaaagagcattctcttgaagagtttttcaaagtgtataccagaaacgatgatgaccgcgaaaaggacattgaaaatctccaatcaaaaatgcgcaaagaaatagccgacgccttcaccaaacaggatgttacgaaacttttctcaagcaaattcaaggattttgttgaaagaggcttgattaaatatgcatcaaacgagaaggaacgcaacatcgtttcccgcttcaaaggttttgccacttactttacagggttcaacaccaatagactgaatatgtactcagaagaagcaaaatccacagctatatcattcagattaattaatcaaaacttgataaagttcatagacaacatccttgtatataaaaaagtgtctcaaacgttgccttcagatatgctatcaaacatttatatagactttaaggcaatcatcaacacatcaagtcttgaagaattcttctccataaacaactacaataacatactcacccagaaacagattgagattttcaatgcagttataggaggtaaaaaagacaaggatgaaaaaataataaccaaaggattcaaccaatatataaacgaatacaaccagacaaataaaaacatccgtctgcctaagatgatgcggttattcaatcaaatcctaagcgacagagaaggtgtttctgcaagaccagagccattcaataacgcgaacgagacaatcagttccgtccgtgattgttttacaaacgaaatatcaaaacaaataacgatattgtctgaaacaacatccaaaattgaatcattcgacattgatagaatttacattaagggcggagaagatctgagagcattatccaacagtatatatggatatttcaattatatccatgaccgtatcgcagacaaatggaaacacaacaatcctcagggcaaaaagagccccgaaagctaccaaaaaaacctcaacgcatatctgaaaggcataaaaagcgtctctttacacagtattgcaaacatctgtggtgacaacaaagttattgagtatttcaggaatcttggcgcagaaaacactgttgatttccaaagagagaacgttgtatcattaatcgacaacaaatacaactgcgcttcaaatcttttatccgacgcccaaattacggatgaagaacttcgcacaaacagtcgctcaattaaagacttgcttgacgccgtcaagagtgcccaacgatttttccgtctactgtgcggttctggcaacgaaccagacaaagaccactctttttatgacgagtatacaccagcatttgaagcacttgagaattcaataaatcccctatataacaaagtcaggagttttgtaaccaaaaaagatttctccaccgataaattcaaattgaatttcgatagcagcagctttctatccggctgggcaacaaaatcagaatatgagaagagttctgcttttatatttattcgagacaatcaatattacttaggtataaacagatgccttagtaaagaagatattgcttaccttgaggattcaacaagctcatcagatgcaaaaagagcggtatatctgtttcagaaagtggatgccaagaatatccccagaatattcatccgttccaaaggttccaatttagctcctgctgtcaacgaattccaactgccgatagaaaccattcttgacatttatgacaataagtttttcactaccagttatcagaaaaaagaccggactaaatggaaagaatcattgaccaaactcattgactattacaagcttggattcagccagcacaagtcatacgcagatttcgacttaaaatggaaagcatccagtgaatataacgacataaatgactttcttgcagacgtacagaaatcctgctacagaatcgaatttataaacatcaattgggacaagttgatagaattcacagaagatggcaagttttacctattccgcattgcaaataaagacttatcaggcaacagcacaggtctgcccaatttgcacacgatttattggaaaatgctttttgacgaaagtaatctcaaagatattgtctataaaatgtcgggcaatgctgaagtctttatgcgctataattcattaaaaaacccaattgtgcataaagcaggagtagaaatcaaaaacaaatgcccttttactgaaaaaaagacaagcatatttgactacgacattataaaagaccgtcgctatacaaaagatcagcttgaactgcatgttccaatcctaatgaacttcaaaagcccatcggcagcaaaaggaaatgttttcaacaaagaatgcttagaatatataaaaaataatggtataaaacatattataggaatagaccgaggcgaacggaatctactttatatggttataacagaccttgacggcaacatcgttgagcaaaagtctttgaaccaaattgcgagcaatccaaaattgcctcttttcagacaagactacaacaagctgctgaagacaaaggctgatgcaaacgctcaagcacgtcgtgattgggagacaataaacaccgtaaaggagataaaattcggcttcttgagtcagattgtacatgaaatagcaatgtctataataaaatacgatgcaattgttgttttggagaatctgaacagagggtttatgcagaaacgaggtcttgagaacaacgtctatcagaaatttgaacaaatgctacttgacaagttgagctactatgttgacaaaacgaaacatccggaagaggccggaggagctttgcacgcatatcagctctctgacacttacgcgaacttcaattctctgtcgaagaatgcgatggtgcgacagtcaggttttgttttctatattcctgcatggcttacaagcaaaatagaccccgtcacaggattcgcctcctttttgaaatttcacagagatgacagtatggcaacaatcaaatctacaatttcaaagtttgactgtttcaaatacgacaaggaatgcgacatgttccacatccgcattgactataacaagtttagcacaagctgcagcggaggtcaacgcaaatgggacttgttcacttttggcgatcgaatcttggcagaacgcaatacaatgcaaaacagcagatatgtttaccaaacagtcaatttaacttctgaattcaaaaacttatttgccacaaaggatatcgacttttcaggcaacctgaaggactctatatgcaaaattgaggatgttggctttttcagaaaactaagccaactcttgtctctcacgcttcaattacgcaacagcaatgctgaaacaggagaagacttcttgatttccccagtagctgacaaagatggcaatttcttcgattcaagaaactgtcccgactctctcccaaaagacgcagatgccaatggcgcatacaacattgctaggaagggattaatgcttgtcgagcaattgaagagatgcaaagatgtatcaaaattcaagcccgcgataaaaaacgaggactggttagactatgttcaacgctga

SEQ ID NO: 483 - skipped

SEQ ID NO: 484 - DNA, 3567 bp, unidentified
  source 1..3567: mol_type = other DNA
atgaacatttacgaaaattttactaatatgtatcaggtgaataagactataagaatggggttaaagccaatatgtaaaactgatgaaaatattgctaaatttcttgaggaagataaggaaagaagtgagaaatacaagatagctaaaaaaataattgataaggaaaatagagcctttatagaggatagattaaaggatttttcaatttcagggttagatgaatatttggaattgcttaaacaaaaaaaggatataacaaaaattcaaaagaaaatgagagatgaaatttcaaaacagttaaaaggcttccctcaatttgatagtaaatataaattccaatatattacagataaagaagatacagaaattttagaatattttaaaaaatttactactttctttacaggatttaattctaatagagaaaatgtttactctaaagaagatatttcgacttctattggacatagaattattcacgaaaatcttccaaaatttatttcaaattttaggattttaaataaagcaatagaggcgttgggaacaggtaaaataaatgaagattttaagaataatgaaattaatgttacagttgaagaacttaataaaatagattattttaacaaggttttaactcaatcaggaatagatttgtataataatttgataggtattttgaatcagaatataaatctatataatcaacaacagaaagtaaaaaagaataaaattggaaagttagaaacattacataaacaaatattaagtgaaaaagataaagtatcgtttattgaagaatttgctgaagataaccagcttttgaaatgtattgatgaatattttaaagaaaaaagttgtttgataaatgtagatttaaagaatttacttgaaaatattgatacttatagtttgaatggtatttttattaaaaatgataagtctttgaaaaatatatctatttatttatataaagattggggatatatatcaaatcttataaatgaagaatacgattataaacacaagaataaggtaaaagatgataagtattatgaaaaaagaaaaaaagctatagataagattaaatatttttctataggatatattgatgaattgttaaaagataaaaatgttcctatggtagaatgctatttcaaagaaaagataaatttagtagtaaaagaatttaatgcttctttaaacaaatttaatgaatataagtttacaaatgagttaaaaactgatgaaattgctgttgaaataataaaaaatttatgtgattcaataaagaagatacagggtataataaagcctttaataattactggaaatgataaagacgatgatttttatgtggaaatcaattatatatgggacgagcttaataagtttgataaaatatataatatggttagaaattatcttacaaaaaaggattacatagaggaaaaaattagaatgatgttttcaaagagtagttttatggatggttggggaaaagattatggaacaaaagaagcacatatagtttatcatgataaaaattattatttagtaatagttgacgaaaaattaaaattagaggatatagataaattatataaaccaggtggagatactgtacattatatatataattatcagtcaatagactatagaaatattcctagaaaattcatatattctaagggtaacagatttgcaccatctgtggaaagatataatttaccaatagaagatgttatcgaagtgtataataataaatattatagaacggagtatgaagagaaaaatcctaaaatttacaaaaaatcattaacatccttaattgattattttaaaataggggtaaatagggatatggattttgaaaaatttgatattaaattaaaagattcaaatgaatacaaaaatataaatgaattttattataatttggaaacttgttgctataagttacaagaagaaaaagttaattttagtgtacttgaagagttttcttatagtggaaaaatttatttatttaaaatatacaataaggatttttctaaatatagcaaaggaacacctaatctccatactttatattttaaaatgctatttgataaagaaaaccttgaaaatcctatttataaacttagtggaaatgctgaaatgttttttagaaaaggaaatcttgatttagataaaacaactatacatcatgctaaccagccaataaataacaaaaatcctaataatagaaagagacaaagtgtatttaaatatgacataattaaaaatagaagatatacagttgataaatttgcattacatatgtcaattactacaaattttcaagtatataagaataaaaatgttaatgaaactgtaaacagagctttaaaatattgtgatgacatttatgctataggtatagatagaggagaaagaaatttattatatgcttgtgtagtaaattcaaggggagaaatagtaaaacaagttcctttaaattttgtaggtaatacagattatcatcaattacttgcaaaaagagaagaagaaagaatgaatagcaggaaaaattggaaaatcattgataatataaagaatttaaaggaaggctatttaagtcaggctatacatataataactgactttatggttgaatataatgctgtacttgttttagaagatttgaattttagatttaaagaaaaaagaatgaaatttgaaaaaagtgtttatcaaaaatttgaaaagatgcttattgataaattgaatttcttagttgataaaaagcttgataagaacgccaatggtggattgtttaatgcgtatcaattaacagaaaaatttacaagctttaaagatatgaaaaatcaaaatggtatagtattttatattcctgcttggatgacaagcaaaattgacccagttacaggatttacaaatttattctatattaaatacgagagtattgaaaaggctaaagagttttttggtaagtttaaatcaataaaatttaataaggtagataactattttgaatttgaatttgattataatgattttactgacagagctcaaggtacaaggtctaaatggacagtttgtagttttggacctagaattgaaggttttagaaatcctgaaaaaaataataattgggatggtagagaaatagatataacagaggaaattaaaaaattacttgatgattataaggtatctttagatgaagatattaaagctcaaattatggatataaataccaaggatttctttgaaaaattgattaaatattttaaacttgtattgcaaatgagaaacagtaaaacaggtacagatattgattatatcatttctccggttagaaataagcaaaatgaattttttgacagtagaaagaaaaatgaaaaattgcctatggatgcagatgcaaatggtgcttataatattgctagaaaaggcttaatgtttattgatataataaaagaaactgaagataaagatttaaagatgcctaaattgttcattaaaaataaggattggttgaattatgtacaaaagagtgatttgtaa

SEQ ID NO: 485 - DNA, 3684 bp, unidentified
  source 1..3684: mol_type = other DNA
atgaaagcagaattgtttaagacttttgtggatgagtatcctgtttcaaaaacattaaggtttagtttaatacctgttggaagaaccctagagaatattgagaaagatgggattcttgattgtgatgaaaaaagatctgaagagtataaacgagtaaaaaaactcctcgatgagtattacaagacttttattgagcatgctttgacaaatgtagaacttgatattaatagtcttgaagaatatgagagactttataatataaaaaataaatccgacaaggaaaaggcagattttgatagtgtacagaaaaatctaagaaaacaaatagtcaaagctttaaaagaagatgagaaatataaatttttatttaaaaaagaaattattgaaaaggaattagtggactttttaaatggaagagattcagatgttgaattggttaaatcatttaagggctatgctactatgtttcaaggcttttgggatgcaagaaaaaatatattttctgatgaagaaaagtctacagctattgcatatcgaataattaatgaaaatcttccaaaattcatttcgaataaaaatatatattttactaaaatacaacctgaaatggatgctgaacttgatcaattaacgttatctaataattcaaatgaaattcgtgatatttttaaattggagtatttttctaaaactataactcaaacaggtattgaaatatataatggtattttaggtggatatacaatcgatgaacaggtaaagttgcaaggaatcaatgaaattgtgaatttgcataatcaaaaaaacaaagatagtggaaaaattccaaaacttaaaatgctttataagcagattttatctgatacaaatacgttatcatttatagcagaaggatttgaaacagatgatgaagtgcttgagtctttaaatattttttatgatgttttcaatgaaaatatacttgatgaggatttaggtattattaatttattgagaaatatagataaattttcatatgatggcatttatataaagaatgataaagctttaatagatatttctaattatttatttggagattggcattatattaaaaatgccattaataagaagtatgaaattgataacccaggtaaaaatacagaaaagtatattgtaaagagaaacaagtttataaaaagctttgatagtttttctttgaaatatcttcaagattgtacaggaagtaaatttaatgaacatatattaattaaaataaataatcttattgatgatgtaaaaaaagcgtataattcagttgcactattgattaagaataaatatgaaggtacgaatttaataaacgataaagatgctattgaaaaaataaaacaatttttggattctatgaaaagtttagtttcatttattcgttgttttgaaggtactggtcaagagccagatagagatgagattttctatggtgaatttgatacaggaaagaagacattttattacttaaacaatatatataataaaacgcgtaattatgttacaaaaaaaccttatagcatagaaaaatataaattaaattttgacaatgcagaattattaacaggatgggatttaaataaagagacaagtaaggctagcattattctaaaaaaagataatttgtattatttaggaataatgaaaaagagcgaccgcagagtatttttgaatgtaccagagacagaaagtacatataattgttatgaaaaaatggaatataagttgttaccaggtccaaataaaatgttacctaaagtgttttttgctaaatcaaatatagactattatgaccctagtcctgaaattatgaggatatataaagaaggcacttttaaaaagggtgataatttcaatatagatgattgtcatgatttaatagattactttaaagaatctttggataaaaatgatgattggaaaatttttgattttgacttttcggagacatcatcttataaggatataggggaattttataaagaagtacaacagcaaggatataaaattagttttaagaatatagcatcttcttatgtagatgagcttgttgaaaatggtaagttgtatttgtttcaaatatacaataaagacttttctaaaaatagtaaaggaactgaaaatctacatacaatgtattggagagccttatttgatgaagaaaatttagaaaatgtaatatataaattgaacggtgatgctgagattttctttagacgaaagagtatttcagaaaatgagaaaatagttcatcctgcacatgttgaaattgagaataaaaatgatgagactagaaaagagaaaaaaacaagtattttcaattatgatattataaaagataaacgttttacagttgataaattccagttccatgtacctattacactgaactttcaagcaatagatcgtaaaagtgatattaatttacgtatgagacaagaaattaaaaagaataaggatatgcatataataggaatagatagaggagagcgaaacttattatatataagcataatagatcttgatggaaatattgtaaaacaagaatcacttaatactattaccaatgagtatgatggtaagatttatactactgattatcataaattacttgataaaaaggaagaaaaacgtaaagttgctcgtcaaacatggaatactatagaaaatataaaagaattaaaggctgggtatatgagtcaggtggttcataaaataactcagttaatgatggagtataatgctatagtagtattagaagacttaaacactggatttaaacgaggtcgtcagaaggttgaaaaacaaatttatcaggcttttgaaaaagctttaattaataaattaaactattacgttgataagaaagtagataaaaatgagatatctggtttatataaacctcttcaattaacaaaagaatttgaaagttttaaaaagcttggaaaacagagtggcgctatattttatgttcctgcatggaatacaagtaaaatggatccaacaacaggatttgttaatttattatcagtaaaatatgaaaatatggagaaatcaaaagaatttattaacaaaataaaagatattaattttaaggaagatgattgtggaaaatactatgaatttcatattgatttcaatgagtttaccgataagggcaaagatacaaaaacagattggaatatttgtagttttggcaaacgtatagataatgctcgaaatcaaaaaggggatttcgaaagtaagatgatagacttaacaaatgagtttcataacttattcaaaaagtacggcattaatgataattctaatctgaaggaagatattttaaatgtaaaagaagccaaattttataaagagtttataaatttatttaaattgatgctacagattcgaaatagcgaatcaaatgaaaaagttgattttcttcaatcaccagttaagaataataaaggagagttttttaattcaaataatgtaaatggaaatgaagctccagaaaatgccgatgcaaatggagcatataacattgctagaaaaggattgtggattgttaatcagattaaaacaatgccagatagtcaaatgcataagattaagcttgcaatgaaaaatcaagaatggcttttatttgcacaaaaagggaatgtataa

SEQ ID NO: 486 - skipped

SEQ ID NO: 487 - DNA, 3909 bp, unidentified
  source 1..3909: mol_type = other DNA
atgccaaatatttctgaatttagtgaacattttcaaaagactttaacattaagaaacgagttagtacctgtaggaaaaactcttgaaaacatcatttcttctaatgtattgataaatgatgaaaaaagaagtgaagactataaaaaggctaaagagattatagactcttatcatcaagagtttatagaaaaatctctttcatctgtaactgttgattggaatgatttgttctcctttttatccagaaaagaaccagaagactatgaagaaaagcagaagttcctagaagagctagaaagtattcagcttgaaaagagaaaaagcattgttaatcaatttgaacaatatgattttggttcatacacagatttaaagggaaagaaaacaaaggaactaagttttgagagcctttttaaatcggagttatttgattttcttttacctaattttataaaaaataatgaagacaaaaaaataataagtagttttaacaagtttacttcttactttactggtttttacgaaaatagaaagaatttatatacatcagcacctttgccaacggctgttgcttacagaatagttaacgataactttcctaaattcatttctaaccaaaagatctttcgtgtgtggaaagacaatgttcctaagtttgtagaaatagcgaaaactaaactaagagaaaaaggtatttctgatttaaatttagaatttcaatttgagttatcaaatttcaattcatgtttaaatcaaacaggaattgattcttacaatgaactgataggtcaactaaactttgcaattaaccttgaatgtcagcaagacaagaatttaagtgagcttttaaggaagaaaagaagccttaaaatgatacctctgtataaacagattttatcagataaagactcttcattctgcattgacgaatttgaaaatgatgaatcagcgataaatgatgttatttctttttataagaaagcggtttgtgaaaacggtcctcaacgaaaactatccgaattattacgtgatttgtcatctcacgatcttgataagatatttattcaaggtaaaaacttaaattcaatttctaaaaatttatttggaggaaaaaactggtctttactcagagatgccattattgcagaaaagtcaaaagacaaaagctataaaaaggctataaagacaaatccttcatcagacgatcttgacagaattctatctaaagatgaattttcaatttcatacttatcaaaggtatgcggaaaagatttgtgcgaagaaattgataaatttattaaaaatcaagatgaactgttaattaaaataaattcacaagcttggccaagctctcttaagaatagtgacgagaaaaatctcataaaatcaccattagatttcttgttaaatttttatagatttgctcaggcattttcttcaaataatacagataaggatatgtctttatatgccgattatgatgtatctttatctttattggtctctgtaataggtctttataacaaagttagaaactatgcaaccaagaagccttatagtcttgaaaaaatcaaattaaattttgaaaatccaaacttagcaacaggttggagtgaaaacaaagaaaatgattgtttatcagtaatcttattaaaaaatcaaatttactatttaggtattttaaacaaaagtaataaacctaatttttctaatggtatttctcaacaaccttcttcagaaagctgctataaaaagatgagatacttattattcaaaggattcaataaaatgttacctaaatgtgcttttacaggagaagtaaaagagcattttaaggaatcttctgaagattatcatctttataacaaggatacttttgtttatcctcttgttattaacaaagagatttttgatctagcatgcagtacagaaaaagtaaaaaaatttcaaaaagcatatgaaaaggtcaactatgcagaatataggcaatcactgataaagtggatttcttttggccttgaatttttatctgcatacaaaactacatctcaatttgatttatcaaatttaagaaaacctgaagaatatagcgatctaaaagaattttatgaagatgtagacaatctaacatacaagatagaattagtagatttaaaagaagaatatgtagactctttggttgaaaatgggcaactgtttttattcgaaataagaaataaagattttgcaaaaaaatctagtggaactcctaatttacatactctttattttaaaagcatatttgatccgagaaatttaaaaaattgtattgtcaaacttaatggtgaagccgagattttctacagaaagaaaagcttgaagattgatgacataacagttcatcaaaaaggaagttgccttgttaataaagttttcttcaatcctgattctggcaaatccgagcagatcccagacaaaatctataacaatatttatgcatatgttaatggcaaatcaacaactttatcaaaagaagatgagtttttttacacaaaagccacaataaaaaaagcaactcacgagatcgtaaaagataaacgctttactgtggataaattctttttccactgcccaattacgattaactataaatctaaagataagccaactaaatttaatgacagagtattagatttcttaagaaagaatgaagatatcaacattattggaatagatcgaggtgagagaaatcttatctatgcaactgtaattaatcaaaaaggtgaaattattgattgcagatcttttaatacaatcaagcaccagtcttcatctgtaaattatgatgtagattatcacaataaattgcaagaaagagaaaataatagaaaagaagaaaagagatcttggaacagtatttctaaaattgcagaccttaaagaaggatatctttcagctgtaattcatgagatagcattaatgatggttaaatacaatgctattgttgttatggaaaatttgaatcaaggctttaagagaatcagaggcggaatcgctgaaagatctgtgtaccaaaaatttgagaaaatgctgatagataaacttaattattttgttattaaaaatgagaattggacaaatcctggaggagttctcaatggttatcagttgacaaacaaggtatcaacaatcaaagaaattggtaatcaatgtggttttttattctacgtacctgcagcatatacttcaaagatagatccttcaactggttttgttaatttgttgaatttcaataaatacaataactcagataaacgaagagagcttatttgcaaattttacgagatttgttatgtgcaaaatgagaatttatttaaattttctatagattatggaaaattatgccctgatagcaaaatacctgtaaaaaaatgggatattttctcttatgggaaaagaattgttaaggaagatctaaagactggttatatgaaagaaaatccagaatacgatccaactgaagaacttaagaatttgtttacattaatgagggttgagtataaaaaaggtgaaaatatacttgaaacaatatctatcagagacatgagtagagaattttggaattctcttttcaagattttcaaagctatattacaaatgagaaatagtctaactaattcaccggtagacagacttttatctccagtaaagggaaaagatgcaaccttctttgatacagataaagttgatggaactaaatttgaaaaattaaaagatgctgatgcaaatggagcttataacattgcattaaaaggcttattaattctcaaaaataatgattctgtaaagacagacaaagaactaaaaaatgtaaagaaggtaagtcttgaggattggttaaagtttgttcaaatctccttaagaggataa

SEQ ID NO: 488 - DNA, 3756 bp, unidentified
  source 1..3756: mol_type = other DNA
atgaaacgcctaattgactttacaaacatctatcagcgatcaaagactttgaggtttcgattggagcctatcggtaaaacggccgactatattaaggtttctcagtacctcgaaactgatgagcgtttggcaaaagagagcaagaaggtaaaagagcttgctgatgaatatcacaaagagtttattggagatgtcctgtcttcgttggaattgcctttaagcaaaatcaacgagttatgggatatatatatgtccaatgatacagaccgcgagataaaattcaaaaaactgcaagagaacctgcgaaaggtgattgcagaggcttttagtaaggacaaacggtttggtagtttattcaaaaaggagataatcacagacattctgccgaaattcttgcaagataaggatgatgatattaagatcgtaaatagattcaagggatttaccacatatttttacgcctttcataaaaatagggaaaatatgtatgtctcggaagagaaatcgactgcaataccatatcgaattgtgaatcaaaatctcgtcaagtattttgacaactacaagacgttcaaagagaaggtaatgcctcttctgaaagacaagaatatagtcgaaagcatagagagagacttcaaagacatcttgaacgaaaaatcaatagaggatgtttttggccttgccaacttcactcatactttatgtcaggctgacatcgagaaatacaatacgttgataggtggccttgtcgtcaaaaacgaaaaaaaagagattaaaggtattaatcagtacattaacgaacataaccaaacgagtaaaaaagggaatggaattccgaaactaaagccgttattcaatcagattttgagcgatagaaaatcgttatcgtttaccttagacgatatcaaaaaaacgtcggaggctattcgcaccattaaggatgagtatgaaaatctccgagacaagttggcgaccatcgaaaggcttattaagtctatcaaggagtatgatcttgcaggtatttacatcaagatgggagaggatacttcgacaatatcgcagcattggtttggtgcgtattataaaatcatcgaagcgatagcagatgcatgggaacgacgaaatccgaagaaaaacagagaatccaaggcatatagcaagtatctatcgtccctaaaaagcatcagtctccaagaaatagatgacctcaaaatcggagagcctatagagaactacttcgcaacttttggcacgacttgttcagaccgaacaagtggagtttcttcgctcaataggatagaagctgcttataccgagttcgtgaacaaatttcctgaaggatttgaagatggcgatgactgtaacgatgcctactttaaggctaatgtggaagtcgtcaaaaatctgctggattcaattaaagattttcagcgttttgtgaagcctttgcttggcaatgaggacgaaagagacaaagacgaggctttctatggagagtttgtcccgacatacacagatatggataacatcataacccctctatacaaccgtgtacgcaattttgccaccaagaaaccatactctacagacaagataaaaatcaactttgaaaaatccacactgcttaccggatgggcaaattacaagcaatatggcggtgtcttgttctgtaaaaatgatagtgatttctatcttggcattgtaaaatcgtccaagacagaaatccatacagtcgatgatagcgcctcggatatatatagaattgattatgctctgattccgaacccgggcaaaaccattccttgtttaatgtttagggatgaggtgaaggctgaaaaggtaaacgggcgtaaagataaacgtacaggtgaaaatttgagattggaagaagaaaaggataagtatcttcctgcagagattaataggatacgtaaatccaggtcttatctgaagagttcggaatgttattgcaaccaagatatggttgcatacatcgactattacaaaaaatgttgtattagttattatgacaaactatcctttactttcaaggatagtagtatgtactcggactggaacgattttatcgctgacgtcgatggtcagggatatcaattgaacaggatacccgtgtctatgcaggagctagagaacttggtagacaatggcaatatgcttctattccgtatcgcgaataaagatttttcgcctaacagcaagggccggcccaatcttcataccatatattggcgaatgcttttcgacccggccaacctgaaagatgttgtatatcagctcaatggtaatgccgaaatattcttccgtaaggcaagcattacgaggacggagcctacacatccggctaacgttgccatcaaaaacaagagcgaatataacaaacagaataagccgtatagtacattcaagtacggtttaatcaaggataggcgctacactaccgaccagttcgagtttcatgtacccatcactatgaacttcaagcaaccagagtcgtctaaactacaggacaagctcaacaagcaagtacttgacttcttgaaacaggacggcgtacgccatattataggcattgatcggggcgaacgtaatctgctatacttggtgatggtagatatggagggcaaaatcaaaaaacaaatatcactcaacgagatagccggtaatccgaagaattccgagttcaaacaagacttccatgcactgctgcgcgagcgcgaaggagaccgtctggagtcccgtcgcagttggaacaccattcagagcattaaggacctcaaagaaggttacatgagcttggtggttcatgaaatagcgaatatgatgcttgagaatgatgctatagtagtgctcgaaaacctgaatcgctcgtttatgcaaaagctcggcggcagagaaaagtctgtataccaaaagttcgaaaagatgcttatcgacaagttgggatacatcgtggataagactaaagatgtgtccgacaacggaggcgcactacatgctgtacagcttgctgatacgtttgaaaacttcaataagacccaaaaaggagctattcgtcaatgtggattcatattctatattcctgcatggcgtaccagcaagattgaccccgttaccggctttgtgccaatgcttaggtgtcaatatgaaagcatcgtagcatccaaagacttctttggaaagttcgacagtatatactacgatgcgacaggaaagtattttgtcttccaaactgactttaccaaattcaataccgagagcaaaggaggaattcaaaaatgggatatatgcacctatggagacagaatatatactcctcgcaccaaagaccggaataatagccctgtttcggaacgtgtaaaccttactgaggcgatgaaatcactgtttgtattgcataatatcaatattcaaggcgatatcaaagccggaattatgcagcagacagacaaggcgttcttcgagtcactgcatcgattgcttcgacttacgttgcaaatacgcaatagcaaaaaatctacaggcgaaaactatgaagactatatcatatcgccggtgatgggcaaggacggtcgtttcttcgattcacgtaacgcggatgctacacaacctaaggatgcagatgccaatggcgcgtacaatattgcgcgcaaaggcttgatgctgcttcgccagattcaagcccaagagaagcaagacctatccaacggaaaatggcttgaatttgcccaaaggtga

SEQ ID NO: 489 - DNA, 3819 bp, unidentified
  source 1..3819: mol_type = other DNA
atgataatttataattgttatatcggaggcagttttatgaaaaaaatagatagctttactaactgttattctcttagcaaaaccttgagattcaagctgatacctattggcgctacgcaaagtaattttgatttaaacaaaatgcttgacgaagataaaaaaagggcagaaaactattctaaggcaaaaagcattattgataaatatcatcgcttttttattgagaaagctttatcttcagttaccgagaataaggtttttgacagttttctcgaagatatcagagcatacgctgagctttattacagatcaaataaagatgacagcgacaaggcttcaatgaaaacacttgaaagcaaaatgcgtaagttcattgctttagctttacagtcggatgaaggttttaaagatttgttcggacagaatttaatcaaaaagactcttcccgaatttcttgaaagtgatgcggacaaggagataattgcggaattcgatggtttctcaacatattttaccggtttcttcaataatcgcaaaaacatgtacagcgcagacgatcaatcaacggcaatttcccaccgttgcattaatgataaccttccaaagttccttgacaatgtcagaacatttaaaaattctgatgttgccaacattctcaacaataaccttaaaattctcaatgaagattttgacggtatttacggaacctctgccgaagatgtattcaatgttgattattttccgtttgtgctttcacagaaaggaattgaagcatataattctatactcggtggctatacaaactctgacggcagtaagattaaaggattaaacgaatatatctatctttacaaccaaaagaacgggaacatacatcgtattccaaaaatgaaacagttgtttaaacagattttaagcgaaagggaaagtgtttcattcatacccgaaaaatttgattcggatgatgatgtcctttcttcaattaatgattattatcttgaaagagacggaggaaaagttctttcaattgaaaaaacggttgaaaagattgagaaactattcagcgctgttacggattactgcaccgacggaatatttgttaagaatgccgcagaacttacagctgtctgctcgggagcattcggttattggggcactgttcaaaatgcctggaacaacgagtatgatgctcttaacggttataaagaaaccgaaaaatatatcgataaaagaaaaaaagcgtataaatcggttgaaagcttttctcttgctgatattcaaaagtatgccgatgtttctgaatcttccgaaacaaacgctgaagttacggaatggcttcggaatgaaataaaagaaaaatgcaatttggcggttcagggatatgaatcttccaaggacctgatttcaaaaccttatactgagtcaaaaaaactatttaataatgataatgcggtagaattgattaaaaatgccctcgactccgtgaaggaacttgaaaatgttcttcggctgttgctcggcacaggtaaagaagaatcaaaggatgaaaatttctacggcgaatttcttccttgctatgagcgtatctgtgaagttgattcactttatgacaaggtccgtaattatatgacacagaagctgtataagacggataagattaagattaatttcagcaacagccattttttaagcgggtgggcgcagacttattcaaccaaaggtgctttaattgtaaaaaaagagaataattattatttagtgattgttgataaaaagctttcaaatgatgacatagtgttcctgggtacaaatactcaactaagtcctgcagaaaggattgtatatgattttcaaaagcctgataacaaaaacaccccaaggctgtttattcgttcaaaaggaacaagctatgctccggcagtaaaagagtatgatttgcctatatcggatattattgagatatatgataacgaatactttaaaactgaataccgaaaaattaatcctaagggatataaagaagccctcataaaacttatagattattttaagcttggcttcagcaggcatgaatcatatcgttgttttaatttcaaatggaaagaaagcgaacaatatagcgatatttccgagttctacaatgatgttgtcaaatcctgttatcaattaaagagcgaatcgatcaattttgacagtttattaaaacttgtagatgagggcaaactctatctgtttcagctgtacaacaaggatttttccgaacacagtaagggcactcctaatctccatactctttatttcaaaatgctgtttgatgaaaggaaccttgaaaatgttgtattcaaactcaacggtgaagccgaaatgttctatcgtgaagcaagtatcagtaaggatgatatgattgttcacccaaaaaatcagcccatcaaaaacaagaatgagcaaaacagcagaaagcaaagcacatttaaatatgacattgttaaagacagacgctatactgttgaccagtttatgcttcatataccgataacgctcaattttaccgcaaatggcggcacaaatataaacaatgaagtccgcaaggctctcaaggactgtgataagaactatgttataggtattgaccgtggcgagagaaatcttctttatatctgtgtggttgattcggaaggcagaattattgaacagtattcattaaacgagattatcaatgaatataacggcaatacttattcaaccgactatcacgctcttctcgacaagaaggagaaagagcgtctggaatcccgcaaagcttggaaaaccgttgaaaatattaaggaactgaaagagggatatatcagtcaggttgttcataaaatttgcgagcttgttgaaaaatatgatgctgttatcgttatggaagatttgaactttggctttaaacagggccgtagcggaaagtttgaaaaatccgtttatcagaagtttgaaaaaatgcttattgataagctcaattactttgctgataagaaaaaatctcccgaagaaatcggaagcgttctgaacgcatatcagcttactaatgcttttgaaagctttgagaagatgggaaagcagaatgggtttatcttctatgttcctgcgtatcttacgagtaaaattgacccgacgacaggctttgcggacctgcttcatccgtcgtcaaagcaaagcaaggaatctatgcgtgattttgtaggccgctttgactcaatcacattcaacaaaacagaaaactactttgaatttgaacttgattataacaagttcccgagatgtaatacggattacagaaagaagtggaccgtctgtacttacggcagccgtataaaaaccttcaggaatcctgagaaaaacagtgaatgggacaataaaacggttgaattaacgcctgctttcatggctctttttgaaaaatattcaatagatgttaacggagatattaaggcgcagataatgtccgttgacaaaaaagatttctttgttgagcttattggccttctgaggcttactcttcaaatgagaaacagcgaaacaggcaaggtcgatagagattatcttatatcacccgttaaaaacagcgagggcgtattctataacagcgatgattacaagggtattgaaaacgcttcgttacccaaagacgcagatgcaaacggtgcatacaatattgcaagaaaaggcttgtggattattgagcagattaaagcttgtgaaaatgatgcggagcttaacaaaattcgccttgctatgtctaacgccgaatggcttgaatacgcacagaaaaaatga

SEQ ID NO: 490 - DNA, 3906 bp, unidentified
  source 1..3906: mol_type = other DNA
ttgctccctgcccgccggtgcaacggagcggttccgcacatccggcacacggacaaccacgcaacaccaggacattccatgagcctcgattccttcacccgcaaatacaaactcgccaaaaccctccgcttcgagctccgtcccgtggggcggaccctcgaaacgttccgttcgaagttcctgccgggcgacgaacgccgcgccgccgcctatcccggcgcaaaggagatgctggacaacgagcacaaggcgcttctcgaacgggcgctcgccaatccgccggcggggttggattggagcgggctggcacaggcccacgacacctaccgaacaagcgacaagtcgaaagcggcgaaaggcgccttggccgcccggcaggcggtattccggaaggcactggcggaccacctgacgaaagacccgtcatacaaaaccctgacggccgccacgccgaaagaccttttcaaggcgctgaaggcacggtgcgaagaggccggacagccggttcccggcgacttgcagacgttcctgcgcttttcctgctatttcaagggctaccaggaaaaccgccgcaacatctattcggacaaggcgcaggcgacggcggcggcgaaccgggccgtcaacgggaatttcccccgtttcctcgaagacgtccgcatcttccggcacatcgcggaacggtatccgcagattcccgccgatgcggcgcgcgaactcgctccgctgctcgaagggcggacgctcgattccattttcacccccgccgcctacaacggcttcctcgcccagtcgcgcatcgactttttcaattcggttctcggcggattcgttcccgccgaaggcgaaaagacccgcggcatcaacgaattcgtcaacctctaccggcaacggcacgaagacgcccgcgaagaccgcgccctcgccccgctccgccccctccacaagcaaatcctcagcgaccgcgaatcgcattccctcgttccccgcatgttcgaaaacgacggcgccgtcgtgtcggccatccgggagatgctcgacaagcggcttctcgccctggagacggagaacgggaccgaaaacgttcccgacgcgctccaatcccttctggcgacgctttccccgtcgcccgccatctggatcgacggcgcggaaatcacccgcgtttcgaaagacctgctcggttcgtggaacgcgctctccatcctcatggaggccgccgccgaaatccggttcgcttcggaaagcacggagaaaaaacgcgacgccgccgtcgcgaactggatgaaaaagccggtgttttccctcgcggaaatgggcgggctccgcgtggatacggacaacggggcgaaccccgtcgacgtgtcgggactctggaaagggcccgttgcggccgcgcgtttcgacgccgtccgcaaggccgtcgccgaagtgcgcccggtcctcgattccgccccgtccggggaggggacgcccctccgcgaacgccaggaggacatcgcccggatcaaggcggcgctcgacgccatcctcgacctgctccgtttcgtcaaaccgctccgcgcgggcggcgaactcgaccgcgacgaggctttctacggcgcgttcgacccgcttttcgacgccctcgacggcttcgttccgctttacaacaaggtccgcaactacctcacgcggaaaccgggcgaaaccgggagcgtcaagctgatgttcgacaatcctagttttcttgaaggatgggaacagaaccttgagacgaaaagaaccagcatattgtttttccgagatggattctactatctcggcgtaatggctccagacgcaaagattaacttttcggcgtttgccgtttcagcggcttccggttgctaccggaaggtggtttacaaggcaatttcaaaagcggcccaatacttcagcatcaaacaaatcaagccacagaaccctccgcaattcgttttggactggcttgccaaaggttttgacaagaaaaccctgcatcgagatcaactcactcgtttgatttcgtatgtcatggatgatttcataccaaattatcccccattgaaggatggaagcgggcgagtcgcctttgatttttctttccgcaaaccatccgaatacggaagttggaaagaattcacggaccatattgcttccatggcctacaagatttccttcgaggacattcccgcggaagccgtcgaccgcctcgtcgaagaagggaagctgtgcctcttcctcctctggaacaaggatttctcgcaagcgtccaacggccgtccgaacctgcacacgatgtattggaaggcggtgttctccccggaaaacctccgcgacgtcgtcatcaagctcaacggcgaagccgaggtgttctaccgcccgaaaagcatccgcacgcccttccgccacaaggtcggcgagaaaatggtcaaccgccggggccgcgacggcgcgcccgttcccgaagccatccacggcgaactcttccgccacgccaacggggacaccgcgcccctttccggcgccgcgcggcagtggctcgagtccggcaacctcgtggtcaaggaggtgacgcacgaaatcgtcaaggacgcgcgcttcgccgcggacaagttctcgttccacgtcccggtcacgatcaatttcaagcaaccggacgtgtccgcccggttcaacgaccaggtccgcgccttcctccgcgccaacccggacgtgaaggtcatcggcatcgaccgcggcgaacggaacctgctctacctcgcgctcgtggaccgcgagggcaacctgctcgaacagcgttccttcaacaccgtgtcccggacgcgaaaggacggcgtcgtgacgcccaccgactaccaggccaagctcgtccagtccgagaaagaccgcgccgaggcccgcgcttcgtgggcggaaatcggcgccatcaaggacctcaaggcgggatacctttccgccgtcgtccacgaaatcgcggagatgatggtcaagcacaacgccatcgtcgtgctcgaagacctcaacttcgggttcaagcgcggccgtttccgcatcgagcggcaggtctaccagaagttcgagaaggcgctcatcgacaagctcaactaccttgttttcaaggaccgcggcatggaggagccgggggggacgttgcgcggctaccagctcacggatgcattcgagagtttcgagaaaatcgggaagcagaccgggtttctcttctacgtccccgccggctacacctccaaaatcgacccgacgaccggattcacgaacctcttcaacaccaagaagtgcaccaacgccgccggcatccgcgacttcttcgccgcgttcgacgcgatccgttgggatgccgcccgccgtgtcttcgccttctccttcgactacaggaacttcaagacgagccaggaaagccatcggacgaaatggaccgtttattccgcagaccgccgccttgcattcgacaaggagtcccgcagcgagagggaaatcaaccccaccgccatcctcctcggggcgctggaagagaggggcatcgccgtcgcggatggattcgacctcaaggccctgcttctcgccacggaaccctccaaggcaaacgccgccttcttccgctccgtcttttacgccttcgaccggacgctccagatgcggaacagccgcgcggaagaggactacatccactctcctgtcctgaacgcccgcggcgggttcttcgactcccgcgaagcgggcgacgcgctgccccgggaggcggatgccaacggcgcctaccacatcgccctcaaaggcgtccagctcctggaagaaaacctcgccgcggaaacgccaaacctcaagatcgaacacaaggactggttccgcttcgcgcaggaactcgcggagcgcaagttccgttga

SEQ ID NO: 491 - skipped

SEQ ID NO: 492 - DNA, 4014 bp, unidentified
  source 1..4014: mol_type = other DNA
atgacatctttatatccaacaagtaaaactatccgttttaagttggaacctattggaaaaacttctgagaatataaacaaaaatggcatactcagcgcagatgaatgcaaagcgaaagactatttaaagataaaagaaacgatagacgcctatcacaaatatttcatagatcaacaacttcgacttgtaaaaacagaaacaataaataagcaaaaaacaggtacaaaattctttctgattgatggcgtacagaatgtctacaacatatacaataatctgaaaaaagacaggaaagatgaaaaaaatcgcaggctttttttagataaatgcactgctctgcgcaaaaaactcgtcagtgaggcttttccatctgaagtaatcaaaaaactgaccagcggaaaactattcactgacattttgccagagtgggtggctcaagagaatactaccagatccaacgaaaaaaaacttttttggtctgatacgtttaagcgattctcaacatattttagtggttttcacgaaaaccgggaaaatatgtattctggcgaagaaaaatctacagccattgcctataggttgattaacgaaaacctccctcgtttttttgataatgtagaaaatttcggaaaaatacaaaatactctgaaagaatggacaagtatttttagcgataaagaaaaacaactttttaatgaaaaaacaattaaatcaacttttgtattagaaaactatgcaaattgccttacgcagagtgatataacatgctataataatttaatttgtgggtatacatctgaaaacaaagaaaaagttcgaggattaaacgagtttatcaatctccacaatcaaaaaattaaggataaaaaagaaaaactccgctcgtttaagttattatataaacaaatactcagcgatcgcgaaacggtttcatttatcccatatcagtttacttcaataaataagttgtatgatgctattaataatttttatttagtttgcatcgtaaatgaaaaagatgatggaggagaaaattgtaatgtttttgaagctattgagaagcattttaaaaaaataaaagatggtaactatgatttaaagcatatttatatatctcatagatctgtttcatctatttcacaaaaagtttttggtaggtattcatttataaaagatgctttagaatattattattgtacagatataagaccaaagtatgaagaagaaatacaaaaagcaaaaccatctaaacgagaaaaaattgaaaaagaactagataattatgtaaatcaacaatatttacctattgagttagttgataaagcttgtgaaaaatattcaaaaacattagaagataattttaaacattctgaatcttcagcaataacagattattgcgctcattttttgaccaaaattatatcctctaaaacttattcagctggaaaatatgaagatgagcgctactcttgcataaagggtgaactgaatacccagcacgatgaaaactaccatccttcaacagaagtggtgaacaatattaaactcttcatggacactatcctagagtctattcacaggctacgggatttcatcattcgacgcgatgaagaaaatatttgtgagaaagatgaacatttttatgaatttattgataaactttgggaaaagttgtcagcgtttataaatctctatgataaaactcgcaactatctaacaggaaaaccatatagcactgataaaattcgccttacattcaacattcctgctcttgccgacggttgggatgaaaacaaagaaaaagattgcagagctttcatttttaaaaaaagcgaacagtattatcttggaattgcagcaaaatctggtttacatttcgtttacaatgataaagaacataatctctcttcatgttactggaaaatgatctacaagtatttccctgatcccagtaaaatgatcccgaaatgcacaattacaacaaaagatgtaaaaactcattttgcatctagtgatgataactatgaactttttgaccctaaaaaatttgtcaaaccaataattatatcgaaagatatatatgatatttacttcaacgcaggtccgaagcctgcctttacgggagaatttattaaaaatggaggcgaccaaaaagagtataaaaatgcattaacaaaatggattgatttttctaaacaatttctttcttcttattcaagtacagctgtttataacttcgatagcttgcgaccgtcaaatagttatcaaaatatcagtgagttttattctgaaatagctgctttaacttataaaataaattttaaacctattctatcaaaatatattgatgatcttgttcaaaaaggtgatttatatctttttagaattactacgaaagattttaattcaactcatggaatgccgaatcttcatactttgtattggagatcccttttttctgaagaaaatctcgttaaaacgtgtataaaattaaatggacaagcaaatattttttatagagttccatcaataactagtccagttattcacaaaaaagggagtattcttgtcggaagaacagcaaccaatggtaaaaacatccctgaacacatttatactgaattatgcttaatcaaaaacggaaaaaaagcagaaaaggatgccgatactgaaacacgtgaataccttacaaaaattaaaatcagggaagctcagtacgatatcatcaaggatcgtcgcttcacacagagtacttttctttttcatgttccactgacttttaattttggaataaagccaagtaaaactttcgaattcaataacaaaataaacgattttttaaagaaacatgatgatgtcaatattatcggtattgatcgtggagaacggcatctcctctatgtatctgtcataaatagacaaggggatattcttgaacagactactctcaacattttaaatggtgttgactatcacagtaaacttgataaccgcgaaaaggagcgcgccggagctcgaaaaaactggggtactatcggtcgaattgccgacttaaaagaagggtatctttccattgtcattcatactttagtcgagatgatgattcgatataatgctataattgtaatggaagatctcaatacgggcttcaagcgtggccgcttcaaagttgaaaaacaggtttatcaaaaatttgaaaaagcattaatcacgaaattaaattatctttgtcttaaagatattgcaatagataaaattggaggcatattgcacggttggcagctcacaaatccatttgaaagctttaaaaaaatgggacatcagaatggtattattttttatattccagcttggaatacaagtaaaattgaccctataactggatttgtaaacgtaataaaacataaatatacaaacagagagtctgcgaataaattttttgaaaactttaaagaaatctcttataaatcaaaagatgatgcttttgatttcgtatatattgataaattttcgggaaaaaactggattatcacaacaggaggaaaggtaaggtacttctggttgaaagatccgtcagggcacggaggttcaacacagaaggttgatattactcaaaaattaaaaaattgtttcactaaaaacaacataccttgggaaaatggtgaaaatatagttgagactcttacaacctcagtcaatgcctcggttctgaaagaagtgatctggtgtctgcagcgtgttctcgccatgcgaaacagttctgcagaagatggtgtggattttattttatcacctgtcaggatgcctgatggtcggacattctgtagtaataacgctggtgaaaaacttccttgcgatgccaatggcgcatataatattgccagaaaaggcatcttggttatggaaaaaataaaagccggcgataaaaatccgactttaattaaaaatgaggattggctcaattatgcacaaagtgaagtcgtcgtcgcaatgcaaatgaaaaaatataagtag

SEQ ID NO: 493 - skipped

SEQ ID NO: 494 - DNA, 3015 bp, unidentified
  source 1..3015: mol_type = other DNA
ttgtctcaatcagagattgattcctacaattcaaaagttggcaacctgaattatttggttaatctgtattatcagcaaaccaaaaataaccttcccaaatttaaaagcttattcaagcaaattggttgcggagaaaaaaaagattttttaaaaaccataaaagataacgatgaacttaatgatgttttaacaaaagcaaaaaatcttggcgacaaatattttacgggtggaaaagataaagaaaccgtcaaagcctttacagattatcttttgaatttggataattttgaaaatatctattggtcggacaaggcaattaacacaatctccggaaaatattttggtaatttcggcaatttaaaagaaaaattgataaaagcaaaaattttcaatgaagataaaaacagcggtgaagcaaaagttccgcgggcagtccagctttctgatttgtttgaagttttggacgggcaagatgattgggacaaagaaggcgttttatttcgtgaaaattttaaggataataacaaggcaaagcaagacattattaagaacgcccagacgccgcacgaagcattgttgaaaatgatctgcaatgacattgaggatttatctaaaaaatttattaagggggcggacgaagttctaaaaatcgagaaaggagattatcaaaaagacgaaagcaagattgcgatcaaggcttggcttgacgacgcgctttttgcggggcaaattttgaaatattggagagttaaagcgaaatattctattgatggaaattttacagaaatcctcgataaagttaaggtttttgaagtcgttaaagactatgatgtcgttagaaattatttaactcaaaagccgcaaaacaaactgggaaaattaaaattgaattttgaaaattcatcgctagcggctggctgggatataaataaagaaaaagacaattcttgcgtaatattgcaaaatgaacatggaaaacaatatcttgcgataatgaaatatgaagaaacgagtgtttttgaacaaaacaagaaaaatgaactttatatgtctgataattccgggtggaaaaaaattaattataaacttttacctggaccaaacaagatgttgccaaaagttctattttcttcaaaatgggttactaacaatccaacacctgccaatataaagaaaatttatggcaaaggaacatttaaaaaaggcgataattttaataagaatgatttgcacatattgcttgatttttataaaaatcaactaaaaaaatatccatctgaaaaagaaagctgggataaaatttttaattttgatttttctaatacgaaaagctacgaaagcgttgatcggttctatgcagaggttgaaaaacagggctataaacttgaatttatacctgtaaaaaagaataagattgaagaattggtggaaaacggaaaaatttatctttttgaaattaaaagcaaagatagcaatttgaaaaacggcaaagagaaaacctcggcaaaggacctgcaaacaatttactggaacaggatttttagtgatattgaaaacaaaccaaagttaaatggggaggcggagattttctaccgtccggccttggagggaaaaaatctaaaaaggaaaaagtggaagaataaggaaattattgaaaattttcgttttagtaaggaaaaatttattttccattgcccaattacattgaatccttgcctgaaaaataaaagaattaatgatttagtgaatcaagttattgtagaaaccaaaaaccagctatttctcggaattgacagaggcgaaaaaaaccttgcttactattctcttgtaaatcaaaggggagaaattttagagcagggtagttttaatataataaataagcaaaattattgggaaaagttggacataaaacaaggcgatcgcgacttggcgcgcaaaaattggacgacaatcggcaatataaaagatttaaaagatggatatatttcgcaagttgtaagaaaaattgtcgatttggcggtttacaacgagggcgacaggaaaaaaggttttcgcgaaactcccgcgcttattattcttgaggatttaaatatcggcttcaagcgcgggcggcagaaaattgaaaaacaggtttaccaaaaacttgaacttgccttggctaaaaaattgaattttcttgttgataaaagcgctaaagatggggaaatggcttcggttgataatgccttgcagtttactccgccagttcatgattttaacgatattaaaggcaagcaatttgggattatgttttatactaatccaagctttacctcagccactgatccaattacgggctggcacaaaacaatatctattaaaaaggggtcagaaattaaagagcaaatttttgatttattcagtgattttggttttgatggtaaggattattatttcaaatataaagacgcgaatattggtaaagaatggattttatattccggaaaaaatggtgcggaattggatagatatcgcgataaattttcagaaaaagagggtaagaagcattggagcccggatagaattgatatcgttaaaaatttagaaaatatttttaagggatttgataaaaataaatctttcaaagagcagattaaagatggtaaagaattgaataaattcgacaaagaacgaacagcttgggaaagcttaagatttgttattgatgttattcaacagatccgcaacaccggagaagatgaaaaagacaacgactttattctttctcccgttaggggtgcgagtggtgacttttttgactctcgtaagatcaaaaatggtgcaaaactcccgcaaaatggcgatgctaacggcgcgtataatattgcccgcaagggaattattatgagcgaacatattaaaagaaacgcggatttgtttgtgcgaaatgaagagtgggatgcttggcttgcgggagaaaaaaattgggtagattatatggcgaacaatcttaaaataaggcagaaaactgtttaa

SEQ ID NO: 495 - DNA, 3876 bp, unidentified
  source 1..3876: mol_type = other DNA
atgaataccatgacccagagatcgcctgtgtccggtggaaagaatcccgaaggacaaaagtccgtgtttgacagctttactcacaaatacgcattgtcgaagacattgcggtttgagttggtgccgcaaggcaaaacttccgaatccttaaaagctgtttttgaagaagataaaaaagtcgaggaaaactatcaaaagaccaaggtgcgattggaccaattacatcgtttgtttgtgcaagcgtcttttacagaatcaaaagtcagtgcgttaaaacttgcaagttttgtacgtgcatataacgcccttatcggtgttgccaaaaagacacaaacgaaagaacagaagagcgcatatgagaaagaaagaaaagctcttttgtacgaggtcgcaggtctctttgatgagatgggcgatgagtggaaggcacaatatgaagaaatagaatccgttgggcgcacaggcaagcaaaagaaaatcaagttctcatctacaggctgtaaaattctcactgacgaagcggtgttgaatatcctaatggataagtttgctgaagatacacaagtgttttcgacattctttggattcttcacatattttggaaagtttaacgagacgcgagagaatttctacaagagtgacggtacgagcacggcggtggctacacgtgtagtcgaaaatctcgaaaagtttttgcgcaataaacacatcgttgaatccgagtataagaaagtaaaaaccgctatcggactcactgattccgagattcttgcgctgaccgatgttgaggcctatcatcgttgttttttgcaagccggaatcgatgtttacaatactgttcttggaggcagtaccgagcttgagcaaagtgtgaataaaaaagtaaacgaataccgtcagaaaactggaaacaaaatcagttttttggcaaaattacacaatcaaattttgagtgaaaaagacgtgtttgagatgctcgtgataaaaggtgatgcccaactctgggagaaactaaaggtattttctgaagaaaatgtcgcctactgcacgaagatgttggcgctcattcgtgacgcacttactatgccagaaaaaagtgggtatgagtggtcaaaaatatatttctccagtggtgcgatcaatacgatttcgagtaagtacttcacaaactggagtgtactcaagggcgcacttctcgatgcggttggcacggcgaagggtggaggtggggagttacctgattttgtgtcccttcaacacgtacagaatgctctcgatgtgaacgaaataaataaagggaagaaaccgagtgagttgttcaggtcagagatattgaaacatgcagcatttgtcgagagtgtcgggcactttacaaacctcattacaatactcttgagtgaacttgatgcgcgtgttgccgaaagtgcagttgatttggcggacctcaaaaaagattccttttggacaacgggcgcactttcgcagaggcgtaaggaaaaagaagatgaggggacaattcagatcaatcgtatcagcgcgtaccttaatagctgtcgcgatgcgcatcgtatgatcaaatactttgcgacggaaaacaggagagattgggttgagccagaagagggttacgacccaaaattctacgatgcctatcgcgaagaatatgcgaaagacattttctttccgctctacaatgtagcgcgcaattttctcactcaaaaaccatccgatgaaaacaaagtcaaactcaacttcgaatgtggcacccttctttccgggtgggacaaaaacaaagagcaagagaagctgggcattattctgcgaaaagacggcgcttattatcttgcgataatgcgtaaacagtttagtgacatactggaggagaagaaacaccccgaagcgtatcgagcaggtgataatggatattcaaaaatggaatacaaactgtttccagatccaaagcgcatgattcccaaggtggctttcgcggaaaccaacaaaaaaacgtttggatggacaccagaagtgcaggcgattaaagatgagtatgccaagttccaagagtcaaaaaaggaagatcagagtgcgtggaaaaatcagtttgatgcgaataaaactgccagactaattgcgtactatcaaaactgtctcgccaaaggtggttaccaagagacgtttggactcacatggaagaaaccagaggaatatgtgggtatcggtgaatttaatgaccacattgcacagcaaaattacaagataaagtttgttccagtagatgcggactacattgatgagcatgttgcaaaaggagagatgtatttgttcaaaattaaaagcaaagactttgcgagcggatcaacgggtactaaaaatgtgcattcactctacttctcacaactcttttccgaagcaaatctcgcacagacaccgactgtggtacaactcgccggaaatgcggagattttttaccgcgaggcatcggtggagccggaaaaagaaaaacgcaacttcccgcgagacatcaccaaatacaaacgttttaccgaagacaaggtattcttccatgtgccaatcaagatcaacgcggggacggatgcaatgcgtagccaatatcaattcaataagatactcaatgccgagcttatcgcgaagcgcgcaaaagacttttgcatcatcggcattgatcgcggggaaaagcatctcgcatactattcagtgatcaatcaaaaaggtgtgattgtcgacgaagggagtctaaatgagattagcggcaccgactatcacaagcttcttgatggcaaggagaaagaacgtactgccaatcgccaagcatggttaccggtgcgccagatcaaagacctcaagcgtggatatgtatcgcatgctgtcaaaaagatttgcgacctcgccatagaacacaacgcgattatcgtgctcgaaaatctcaacatgcgtttcaaacaaattcgtagtggtattgaaaagagtgtataccaacagctcgaaaagcaactcgtagacaagctcggtcacatggtgttcaaagacaggccggagcttgaaataggcggtgtcctaaacggttatcaactcgccgcgccgtttgagtcgttcaaagacatgggtaatcagaccggtatcgtcttctacactgaagcagcatacacgtcgacgacagatcctgtcaccggattccgtaagaatgtgtatgtcagtaactcagctaccaaagagaagttagaaaaagcaattaaatctttcgatgctattggttggaacgaagaaaggcaaagctactttatcacttacgatccagttagacttgtagataagaaggagaaaactaaaacgatatcgaaattatggacggtatatgcagatgtgccacgtattcgtcgcgagagaaacgaacaaggtgtttggaatgctcggaatgtaaatccgaacgatatgttcaagtctctgtttgaggcgtggaattttgaggacaaaatagcgaccgacctaaaaagtaagatcgaggaaaagatgaaaaatggagaactcagcagctataagatgattgacgggcgagaaaggaacttcttccaggcattcatctatatcttcaatatcattctcgatatccgaaattcgtctgataagaccgacttcattgcatcacccgttgctccattcttcacaaccctcaatgcgccaaagccaaatccatgtgacatcaatctggcgaatggcgactctctcggcgcctacaacattgctcgaaagggtattatcaccattggccgtataaatgataatccagaaaaaccggatttatacatcagtaaagaacagtgggacgaatgggcaactaaacacggaatacaactatga

SEQ ID NO: 496-499 - skipped (4 entries)

SEQ ID NO: 500 - DNA, 36 bp, unidentified
  source 1..36: mol_type = other DNA
atctacaacagtagaaattccctataacgatttggc

SEQ ID NO: 501 - DNA, 34 bp, unidentified
  source 1..34: mol_type = other DNA
ctacaacagtagaaattccctataacgatttggc

SEQ ID NO: 502 - DNA, 36 bp, unidentified
  source 1..36: mol_type = other DNA
ggctataagccctcaataatttctactatcgtagat

SEQ ID NO: 503 - DNA, 36 bp, unidentified; identical to SEQ ID NO: 502
  source 1..36: mol_type = other DNA

SEQ ID NO: 504 - DNA, 36 bp, unidentified
  source 1..36: mol_type = other DNA
gtctagtaaagacatgtaatttctactattgtagat

SEQ ID NO: 505 - DNA, 36 bp, unidentified; identical to SEQ ID NO: 504
  source 1..36: mol_type = other DNA

SEQ ID NO: 506 - DNA, 36 bp, unidentified
  source 1..36: mol_type = other DNA
atctacaatagtagaaattaatagtatctcttaaag

SEQ ID NO: 507 - DNA, 36 bp, unidentified; identical to SEQ ID NO: 506
  source 1..36: mol_type = other DNA

SEQ ID NO: 508 - DNA, 36 bp, unidentified
  source 1..36: mol_type = other DNA
atctacaatagtagaaattaaattagtcttatagac

SEQ ID NO: 509 - DNA, 36 bp, unidentified; identical to SEQ ID NO: 508
  source 1..36: mol_type = other DNA

SEQ ID NO: 510 - DNA, 36 bp, unidentified
  source 1..36: mol_type = other DNA
atctacaatagtagaaattaaatgtgtcttttagac

SEQ ID NO: 511 - DNA, 36 bp, unidentified
  source 1..36: mol_type = other DNA
atctacgatagtagaaattatatattcttattaaac

SEQ ID NO: 512 - DNA, 36 bp, unidentified; identical to SEQ ID NO: 211
  source 1..36: mol_type = other DNA

SEQ ID NO: 513 - DNA, 35 bp, unidentified; identical to SEQ ID NO: 212
  source 1..35: mol_type = other DNA

SEQ ID NO: 514 - DNA, 36 bp, unidentified
  source 1..36: mol_type = other DNA
gtctatatgactaagtaatttctactatgtgtagat

SEQ ID NO: 515 - DNA, 36 bp, unidentified; identical to SEQ ID NO: 514
  source 1..36: mol_type = other DNA

SEQ ID NO: 516 - DNA, 36 bp, unidentified
  source 1..36: mol_type = other DNA
ggctaaagctctttaagaatttctactgttgtagat

SEQ ID NO: 517 - DNA, 36 bp, unidentified; identical to SEQ ID NO: 516
  source 1..36: mol_type = other DNA

SEQ ID NO: 518 - DNA, 36 bp, unidentified
  source 1..36: mol_type = other DNA
atctacaatagtagaaattatttgagcctcttaggc

SEQ ID NO: 519 - DNA, 36 bp, unidentified; identical to SEQ ID NO: 518
  source 1..36: mol_type = other DNA

SEQ ID NO: 520 - DNA, 36 bp, unidentified
  source 1..36: mol_type = other DNA
gaataataatccctttaaatttctactattgtagat

SEQ ID NO: 521 - DNA, 36 bp, unidentified; identical to SEQ ID NO: 520
  source 1..36: mol_type = other DNA

SEQ ID NO: 522 - DNA, 36 bp, unidentified
  source 1..36: mol_type = other DNA
atctacaacagtagaaattgaggttcgttggtcaac

SEQ ID NO: 523 - DNA, 36 bp, unidentified; identical to SEQ ID NO: 522
  source 1..36: mol_type = other DNA

SEQ ID NO: 524 - DNA, 36 bp, unidentified
  source 1..36: mol_type = other DNA
atctacacacagtagaaattatttaggttacttaac

SEQ ID NO: 525 - DNA, 36 bp, unidentified; identical to SEQ ID NO: 524
  source 1..36: mol_type = other DNA

SEQ ID NO: 526 - DNA, 36 bp, unidentified
  source 1..36: mol_type = other DNA
atctacataagtagaaattcttataagttgttagcc

SEQ ID NO: 527 - DNA, 36 bp, unidentified; identical to SEQ ID NO: 526
  source 1..36: mol_type = other DNA

SEQ ID NO: 528 - DNA, 36 bp, unidentified
  source 1..36: mol_type = other DNA
ctctaataggcatattcaatttctacttttgtagat

SEQ ID NO: 529 - DNA, 35 bp, unidentified
  source 1..35: mol_type = other DNA
tctaataggcatattcaatttctacttttgtagat

SEQ ID NO: 530 - DNA, 36 bp, unidentified
  source 1..36: mol_type = other DNA
gttttaaggacttagagaatttctactgttgtagat

SEQ ID NO: 531 - DNA, 36 bp, unidentified; identical to SEQ ID NO: 530
  source 1..36: mol_type = other DNA

SEQ ID NO: 532 - DNA, 36 bp, unidentified
  source 1..36: mol_type = other DNA
atctacaaaagtagaaattagatattatgtttaaac

SEQ ID NO: 533 - DNA, 36 bp, unidentified
  source 1..36: mol_type = genomic DNA
atctacaactagtagaaattttattatttttaatca

SEQ ID NO: 534 - DNA, 36 bp, unidentified; identical to SEQ ID NO: 532
  source 1..36: mol_type = other DNA

SEQ ID NO: 535 - DNA, 36 bp, unidentified; identical to SEQ ID NO: 533
  source 1..36: mol_type = other DNA

SEQ ID NO: 536 - DNA, 36 bp, unidentified
  source 1..36: mol_type = other DNA
gtctaacgaccttttaaatttctactgtttgtagat

SEQ ID NO: 537 - DNA, 36 bp, unidentified
  source 1..36: mol_type = other DNA
ctaacgaccttttaaatttctactgtttgtagatat

SEQ ID NO: 538 - DNA, 35 bp, unidentified
  source 1..35: mol_type = other DNA
ctcaaaactcattcgaatctctactctttgtagat

SEQ ID NO: 539 - DNA, 34 bp, unidentified
  source 1..34: mol_type = other DNA
tcaaaactcattcgaatctctactctttgtagat

SEQ ID NO: 540 - DNA, 36 bp, unidentified
  source 1..36: mol_type = other DNA
atctacaatagtagaaattcaatgaggctgttagcc

SEQ ID NO: 541 - DNA, 36 bp, unidentified; identical to SEQ ID NO: 540
  source 1..36: mol_type = other DNA

SEQ ID NO: 542 - RNA, 36 nt, unidentified
  source 1..36: mol_type = other RNA
gccaaatcgttatagggaatttctactgttgtagat

SEQ ID NO: 543 - RNA, 36 nt, unidentified
  source 1..36: mol_type = other RNA
ggctataagccctcaataatttctactatcgtagat

SEQ ID NO: 544 - RNA, 36 nt, unidentified
  source 1..36: mol_type = other RNA
gtctagtaaagacatgtaatttctactattgtagat

SEQ ID NO: 545 - RNA, 36 nt, unidentified
  source 1..36: mol_type = other RNA
ctttaagagatactattaatttctactattgtagat

SEQ ID NO: 546 - RNA, 36 nt, unidentified
  source 1..36: mol_type = other RNA
gtctataagactaatttaatttctactattgtagat

SEQ ID NO: 547 - RNA, 36 nt, unidentified
  source 1..36: mol_type = other RNA
gtctaaaagacacatttaatttctactattgtagat

SEQ ID NO: 548 - RNA, 36 nt, unidentified
  source 1..36: mol_type = other RNA
gtttaataagaatatataatttctactatcgtagat

SEQ ID NO: 549 - RNA, 36 nt, unidentified
  source 1..36: mol_type = other RNA
gcttaatgcttatattaaatttctactattgtagat

SEQ ID NO: 550 - RNA, 36 nt, unidentified
  source 1..36: mol_type = other RNA
gtctatatgactaagtaatttctactatgtgtagat

SEQ ID NO: 551 - RNA, 36 nt, unidentified
  source 1..36: mol_type = other RNA
ggctaaagctctttaagaatttctactgttgtagat

SEQ ID NO: 552 - RNA, 36 nt, unidentified
  source 1..36: mol_type = other RNA
gcctaagaggctcaaataatttctactattgtagat

SEQ ID NO: 553 - RNA, 36 nt, unidentified
  source 1..36: mol_type = other RNA
gaataataatccctttaaatttctactattgtagat

SEQ ID NO: 554 - RNA, 36 nt, unidentified
  source 1..36: mol_type = other RNA
gttgaccaacgaacctcaatttctactgttgtagat

SEQ ID NO: 555 - RNA, 36 nt, unidentified
  source 1..36: mol_type = other RNA
gttaagtaacctaaataatttctactgtgtgtagat

SEQ ID NO: 556 - RNA, 36 nt, unidentified
  source 1..36: mol_type = other RNA
ggctaacaacttataagaatttctacttatgtagat

SEQ ID NO: 557 - RNA, 36 nt, unidentified
  source 1..36: mol_type = other RNA
ctctaataggcatattcaatttctacttttgtagat

SEQ ID NO: 558 - RNA, 36 nt, unidentified
  source 1..36: mol_type = other RNA
gttttaaggacttagagaatttctactgttgtagat

SEQ ID NO: 559 - RNA, 36 nt, unidentified
  source 1..36: mol_type = other RNA
gtttaaacataatatctaatttctacttttgtagat

SEQ ID NO: 560 - RNA, 36 nt, unidentified
  source 1..36: mol_type = other RNA
tgattaaaaataataaaatttctactagttgtagat

SEQ ID NO: 561 - RNA, 36 nt, unidentified
  source 1..36: mol_type = other RNA
gtctaacgaccttttaaatttctactgtttgtagat

SEQ ID NO: 562 - RNA, 35 nt, unidentified
  source 1..35: mol_type = other RNA
ctcaaaactcattcgaatctctactctttgtagat

SEQ ID NO: 563 - RNA, 36 nt, unidentified
  source 1..36: mol_type = other RNA
ggctaacagcctcattgaatttctactattgtagat

SEQ ID NO: 564 - protein, 1227 aa, unidentified
MKAELFKTFVDEYPVSKTLRFSLIPVGRTLENIEKDGILDCDEKRSEEYKRVKKLLDEYYKTFIEHALTNVELDINSLEEYERLYNIKNKSDKEKADFDSVQKNLRKQIVKALKEDEKYKFLFKKEIIEKELVDFLNGRDSDVELVKSFKGYATMFQGFWDARKNIFSDEEKSTAIAYRIINENLPKFISNKNIYFTKIQPEMDAELDQLTLSNNSNEIRDIFKLEYFSKTITQTGIEIYNGILGGYTIDEQVKLQGINEIVNLHNQKNKDSGKIPKLKMLYKQILSDTNTLSFIAEGFETDDEVLESLNIFYDVFNENILDEDLGIINLLRNIDKFSYDGIYIKNDKALIDISNYLFGDWHYIKNAINKKYEIDNPGKNTEKYIVKRNKFIKSFDSFSLKYLQDCTGSKFNEHILIKINNLIDDVKKAYNSVALLIKNKYEGTNLINDKDAIEKIKQFLDSMKSLVSFIRCFEGTGQEPDRDEIFYGEFDTGKKTFYYLNNIYNKTRNYVTKKPYSIEKYKLNFDNAELLTGWDLNKETSKASIILKKDNLYYLGIMKKSDRRVFLNVPETESTYNCYEKMEYKLLPGPNKMLPKVFFAKSNIDYYDPSPEIMRIYKEGTFKKGDNFNIDDCHDLIDYFKESLDKNDDWKIFDFDFSETSSYKDIGEFYKEVQQQGYKISFKNIASSYVDELVENGKLYLFQIYNKDFSKNSKGTENLHTMYWRALFDEENLENVIYKLNGDAEIFFRRKSISENEKIVHPAHVEIENKNDETRKEKKTSIFNYDIIKDKRFTVDKFQFHVPITLNFQAIDRKSDINLRMRQEIKKNKDMHIIGIDRGERNLLYISIIDLDGNIVKQESLNTITNEYDGKIYTTDYHKLLDKKEEKRKVARQTWNTIENIKELKAGYMSQVVHKITQLMMEYNAIVVLEDLNTGFKRGRQKVEKQIYQAFEKALINKLNYYVDKKVDKNEISGLYKPLQLTKEFESFKKLGKQSGAIFYVPAWNTSKMDPTTGFVNLLSVKYENMEKSKEFINKIKDINFKEDDCGKYYEFHIDFNEFTDKGKDTKTDWNICSFGKRIDNARNQKGDFESKMIDLTNEFHNLFKKYGINDNSNLKEDILNVKEAKFYKEFINLFKLMLQIRNSESNEKVDFLQSPVKNNKGEFFNSNNVNGNEAPENADANGAYNIARKGLWIVNQIKTMPDSQMHKIKLAMKNQEWLLFAQKGNV

SEQ ID NO: 565 - DNA, 3684 bp, unidentified
  source 1..3684: mol_type = other DNA
atgaaggccgagctgttcaaaaccttcgtggatgaataccctgtgtccaagacactgcggttctctctgatccccgtggggagaaccctggagaatattgagaaggacggcatcctggattgcgacgagaagcggtcagaagagtacaagagagtgaagaagctgctggatgagtattataagaccttcatcgagcacgccctgaccaatgtggagctggacatcaacagcctggaggagtacgagcgcctgtacaacatcaagaataaatccgacaaggagaaggctgacttcgattcagtgcagaagaatctgagaaagcagattgtgaaggcactcaaggaggacgaaaagtataagttcctgtttaagaaggaaatcatcgagaaagagctggttgactttctgaacggccgcgacagcgacgtggaactggtgaaaagcttcaagggctacgctacaatgtttcagggcttttgggacgcacgcaagaatatcttctcagacgaggagaaaagcacagccatcgcctatagaattatcaacgagaatctgcctaagttcatttccaacaaaaatatctactttacaaagatccagccagagatggacgccgaactggatcagctgactctgtcaaataattccaacgaaatcagggatatctttaagctggaatacttcagcaaaaccatcacacagacaggcatcgagatctacaatggcatcctgggcggatataccatcgacgagcaggtgaaactgcagggcattaacgagattgtgaacctgcacaaccagaagaataaggacagcgggaagattccaaagctgaaaatgctgtacaaacagatcctgtctgacactaacactctgagcttcatcgctgaagggttcgagaccgacgacgaagtgctggagagcctgaatatcttttacgacgtgttcaacgagaatatcctggatgaggacctgggcatcatcaatctgctgagaaatatcgataaattctcctatgacggaatctacatcaagaatgacaaggccctgatcgatatctccaattacctgttcggggactggcattacattaaaaacgctatcaataagaagtatgaaatcgataaccctggcaaaaacaccgagaagtatattgtgaagcggaacaagttcattaaatctttcgacagtttctccctgaagtatctgcaggactgcaccggctctaagttcaatgagcacatcctgattaagatcaacaatttaatcgacgacgtgaagaaggcctacaatagcgtggcactgctcatcaagaataagtacgaggggaccaatctcattaacgacaaggacgccatcgagaagatcaagcagttcctggattctatgaagagcctggtgtctttcatcaggtgcttcgaaggtaccggccaagagcccgaccgggacgagatcttttacggggaattcgacaccgggaagaagaccttctactatctgaacaacatctataataagaccagaaattacgtgaccaagaaaccatatagcatcgagaagtacaagctgaatttcgataacgcagagctgctgactgggtgggacctgaataaggagacctctaaggccagtatcatcctgaagaaagacaacctgtactacctgggcatcatgaagaagagcgaccggcgagttttcctgaacgtgcctgagaccgaatccacctacaactgctacgaaaaaatggagtacaagctgctgcccgggccgaacaaaatgctgccaaaggttttcttcgccaaatccaacatcgactactatgatccatcccccgaaattatgcgcatctacaaggagggcacttttaagaagggcgacaattttaacatcgatgattgtcacgacctgattgactacttcaaagagtcactggacaaaaatgatgactggaagattttcgatttcgacttctccgagacctcatcttataaggatattggagagttttacaaggaggtgcagcagcagggatacaaaattagctttaagaatatcgcctcatcatacgtggatgaactggtggagaacggcaagctgtacctgttccagatctacaacaaagattttagcaagaacagcaagggaacagagaacctgcatacaatgtattggcgcgccctgttcgatgaggagaacctggagaacgtcatttacaagctgaacggagatgctgagatcttttttaggcggaagagcatcagcgagaatgagaagatcgtgcacccagcccacgtggagatcgagaacaaaaatgatgaaactaggaaggaaaagaagacctctattttcaactacgacatcattaaagacaagcgcttcacagtggacaaatttcagttccacgtgcctatcactctgaatttccaggccatcgacaggaagtccgatatcaacctgcgcatgagacaggagatcaaaaaaaataaggacatgcatatcatcggtattgaccgcggggagcggaatctgctgtacattagcatcatcgatctggacggaaacatcgtgaagcaggaaagcctgaatacaatcactaatgagtacgacggcaaaatctacaccaccgactatcacaagctgctggataaaaaggaggagaagcggaaagtggccaggcagacatggaacacaatcgagaacatcaaagagctgaaggccggctacatgagccaggtggtgcacaagatcacccagctgatgatggaatacaacgccatcgtggtgctggaggacctgaatactggctttaaaaggggtcgtcagaaggtggaaaaacagatctaccaagccttcgagaaagctctgatcaacaagctgaattattacgtggacaagaaggtggataagaacgagatcagcgggctgtacaagcccctgcagctgaccaaggaatttgagagctttaagaagctgggaaagcagtctggcgcaatcttttatgtgcctgcatggaacaccagcaagatggaccccacaaccggattcgtgaacctgctgtctgtgaagtacgagaacatggagaagtccaaggaattcatcaacaaaatcaaggacattaatttcaaagaagatgactgtggcaaatattacgagtttcatatcgatttcaacgaattcaccgataagggcaaggataccaagactgactggaatatctgttctttcggcaagcgcattgacaatgccaggaatcagaagggggacttcgagagcaagatgatcgatctgacaaatgagttccacaacctgttcaagaagtatggcatcaatgacaactccaacctcaaggaggacattctgaacgtcaaagaggccaaattctacaaggagttcatcaatctgttcaagctgatgctgcagatcaggaacagcgagagtaacgagaaggtggacttcctgcagtcccccgtgaagaataacaagggcgaattcttcaactccaacaacgtgaacggaaatgaggcccctgagaacgccgacgccaatggggcctacaacattgcccggaaaggcctgtggattgttaaccagatcaagactatgccggactcacagatgcacaagatcaagctggctatgaagaatcaggaatggctgctgttcgcccagaaagggaacgtgtga

SEQ ID NO: 566-600 - skipped (35 entries)

SEQ ID NO: 601 - RNA, 33 nt, unidentified
  source 1..33: mol_type = other RNA
gccaacatgaggatcacccatgtctgcagggcc

SEQ ID NO: 602 - protein, 7 aa, unidentified
PKKKRKV

SEQ ID NO: 603 - protein, 8 aa, unidentified
VSRKRPRP

SEQ ID NO: 604 - protein, 6 aa, unidentified
QRKRKQ

SEQ ID NO: 605 - protein, 6 aa, unidentified
GGSGGS

SEQ ID NO: 606 - protein, 9 aa, unidentified
GGSGGSGGS

SEQ ID NO: 607 - protein, 12 aa, unidentified
GGSGGSGGSGGS

SEQ ID NO: 608 - protein, 15 aa, unidentified
GGSGGSGGSGGSGGS

SEQ ID NO: 609 - protein, 18 aa, unidentified
GGSGGSGGSGGSGGSGGS

SEQ ID NO: 610 - protein, 21 aa, unidentified
GGSGGSGGSGGSGGSGGSGGS

SEQ ID NO: 611 - protein, 24 aa, unidentified
GGSGGSGGSGGSGGSGGSGGSGGS

SEQ ID NO: 612 - protein, 27 aa, unidentified
GGSGGSGGSGGSGGSGGSGGSGGSGGS

SEQ ID NO: 613 - protein, 30 aa, unidentified
GGSGGSGGSGGSGGSGGSGGSGGSGGSGGS

SEQ ID NO: 614 - protein, 33 aa, unidentified
GGSGGSGGSGGSGGSGGSGGSGGSGGSGGSGGS

SEQ ID NO: 615 - protein, 36 aa, unidentified
GGSGGSGGSGGSGGSGGSGGSGGSGGSGGSGGSGGS

SEQ ID NO: 616 - protein, 39 aa, unidentified
GGSGGSGGSGGSGGSGGSGGSGGSGGSGGSGGSGGSGGS

SEQ ID NO: 617 - protein, 42 aa, unidentified
GGSGGSGGSGGSGGSGGSGGSGGSGGSGGSGGSGGSGGSGGS

SEQ ID NO: 618 - protein, 45 aa, unidentified
GGSGGSGGSGGSGGSGGSGGSGGSGGSGGSGGSGGSGGSGGSGGS

SEQ ID NO: 619 - protein, 6 aa, unidentified
GSGGSG

SEQ ID NO: 620 - protein, 9 aa, unidentified
GSGGSGGSG

SEQ ID NO: 621 - protein, 12 aa, unidentified
GSGGSGGSGGSG

SEQ ID NO: 622 - protein, 15 aa, unidentified
GSGGSGGSGGSGGSG

SEQ ID NO: 623 - protein, 18 aa, unidentified
GSGGSGGSGGSGGSGGSG

SEQ ID NO: 624 - protein, 24 aa, unidentified
GSGGSGGSGGSGGSGGSGGSGGSG

SEQ ID NO: 625 - protein, 27 aa, unidentified
GSGGSGGSGGSGGSGGSGGSGGSGGSG

SEQ ID NO: 626 - protein, 30 aa, unidentified
GSGGSGGSGGSGGSGGSGGSGGSGGSGGSG

SEQ ID NO: 627 - protein, 33 aa, unidentified
GSGGSGGSGGSGGSGGSGGSGGSGGSGGSGGSG

SEQ ID NO: 628 - protein, 36 aa, unidentified
GSGGSGGSGGSGGSGGSGGSGGSGGSGGSGGSGGSG

SEQ ID NO: 629 - protein, 39 aa, unidentified
GSGGSGGSGGSGGSGGSGGSGGSGGSGGSGGSGGSGGSG

SEQ ID NO: 630 - protein, 42 aa, unidentified
GSGGSGGSGGSGGSGGSGGSGGSGGSGGSGGSGGSGGSGGSG

SEQ ID NO: 631 - protein, 45 aa, unidentified
GSGGSGGSGGSGGSGGSGGSGGSGGSGGSGGSGGSGGSGGSGGSG

SEQ ID NO: 632 - protein, 4 aa, unidentified
GGGS

SEQ ID NO: 633 - protein, 8 aa, unidentified
GGGSGGGS

SEQ ID NO: 634 - protein, 12 aa, unidentified
GGGSGGGSGGGS

SEQ ID NO: 635 - protein, 16 aa, unidentified
GGGSGGGSGGGSGGGS

SEQ ID NO: 636 - protein, 20 aa, unidentified
GGGSGGGSGGGSGGGSGGGS

SEQ ID NO: 637 - protein, 24 aa, unidentified
GGGSGGGSGGGSGGGSGGGSGGGS

SEQ ID NO: 638 - protein, 28 aa, unidentified
GGGSGGGSGGGSGGGSGGGSGGGSGGGS

SEQ ID NO: 639 - protein, 32 aa, unidentified
GGGSGGGSGGGSGGGSGGGSGGGSGGGSGGGS

SEQ ID NO: 640 - protein, 36 aa, unidentified
GGGSGGGSGGGSGGGSGGGSGGGSGGGSGGGSGGGS

SEQ ID NO: 641 - protein, 40 aa, unidentified
GGGSGGGSGGGSGGGSGGGSGGGSGGGSGGGSGGGSGGGS

SEQ ID NO: 642 - protein, 44 aa, unidentified
GGGSGGGSGGGSGGGSGGGSGGGSGGGSGGGSGGGSGGGSGGGS

SEQ ID NO: 643 - protein, 48 aa, unidentified
GGGSGGGSGGGSGGGSGGGSGGGSGGGSGGGSGGGSGGGSGGGSGGGS

SEQ ID NO: 644 - protein, 52 aa, unidentified
GGGSGGGSGGGSGGGSGGGSGGGSGGGSGGGSGGGSGGGSGGGSGGGSGGGS

SEQ ID NO: 645 - protein, 56 aa, unidentified
GGGSGGGSGGGSGGGSGGGSGGGSGGGSGGGSGGGSGGGSGGGSGGGSGGGSGGGS

SEQ ID NO: 646 - protein, 60 aa, unidentified
GGGSGGGSGGGSGGGSGGGSGGGSGGGSGGGSGGGSGGGSGGGSGGGSGGGSGGGSGGGS

SEQ ID NO: 647 - protein, 5 aa, unidentified
GGGGS

SEQ ID NO: 648 - protein, 10 aa, unidentified
GGGGSGGGGS

SEQ ID NO: 649 - protein, 15 aa, unidentified
GGGGSGGGGSGGGGS

SEQ ID NO: 650 - protein, 20 aa, unidentified
GGGGSGGGGSGGGGSGGGGS

SEQ ID NO: 651 - protein, 25 aa, unidentified
GGGGSGGGGSGGGGSGGGGSGGGGS

SEQ ID NO: 652 - protein, 30 aa, unidentified
GGGGSGGGGSGGGGSGGGGSGGGGSGGGGS

SEQ ID NO: 653 - protein, 35 aa, unidentified
GGGGSGGGGSGGGGSGGGGSGGGGSGGGGSGGGGS

SEQ ID NO: 654 - protein, 40 aa, unidentified
GGGGSGGGGSGGGGSGGGGSGGGGSGGGGSGGGGSGGGGS

SEQ ID NO: 655 - protein, 45 aa, unidentified
GGGGSGGGGSGGGGSGGGGSGGGGSGGGGSGGGGSGGGGSGGGGS

SEQ ID NO: 656 - protein, 50 aa, unidentified
GGGGSGGGGSGGGGSGGGGSGGGGSGGGGSGGGGSGGGGSGGGGSGGGGS

SEQ ID NO: 657 - protein, 55 aa, unidentified
GGGGSGGGGSGGGGSGGGGSGGGGSGGGGSGGGGSGGGGSGGGGSGGGGSGGGGS

SEQ ID NO: 658 - protein, 60 aa, unidentified
GGGGSGGGGSGGGGSGGGGSGGGGSGGGGSGGGGSGGGGSGGGGSGGGGSGGGGSGGGGS

SEQ ID NO: 659 - protein, 65 aa, unidentified
GGGGSGGGGSGGGGSGGGGSGGGGSGGGGSGGGGSGGGGSGGGGSGGGGSGGGGSGGGGSGGGGS

SEQ ID NO: 660 - protein, 70 aa, unidentified
GGGGSGGGGSGGGGSGGGGSGGGGSGGGGSGGGGSGGGGSGGGGSGGGGSGGGGSGGGGSGGGGSGGGGS

SEQ ID NO: 661 - protein, 75 aa, unidentified
GGGGSGGGGSGGGGSGGGGSGGGGSGGGGSGGGGSGGGGSGGGGSGGGGSGGGGSGGGGSGGGGSGGGGSGGGGS

SEQ ID NO: 662 - protein, 32 aa, unidentified
LEPGEKPYKCPECGKSFSQSGALTRHQRTHTR

SEQ ID NO: 663 - DNA, 48 bp, unidentified
  source 1..48: mol_type = other DNA
tcgggatctgagacgcctgggacctcggaatcggctacgcccgaaagt

SEQ ID NO: 664 - protein, 64 aa, unidentified
LEPGEKPYKCPECGKSFSQSGALTRHQRTHTRLEPGEKPYKCPECGKSFSQSGALTRHQRTHTR

SEQ ID NO: 665 - protein, 96 aa, unidentified
LEPGEKPYKCPECGKSFSQSGALTRHQRTHTRLEPGEKPYKCPECGKSFSQSGALTRHQRTHTRLEPGEKPYKCPECGKSFSQSGALTRHQRTHTR

SEQ ID NO: 666 - protein, 20 aa, unidentified
PKKKRKVEASSPKKRKVEAS

SEQ ID NO: 667 - protein, 16 aa, unidentified
KRPAATKKAGQAKKKK

SEQ ID NO: 668 - protein, 9 aa, unidentified
PAAKRVKLD

SEQ ID NO: 669 - protein, 11 aa, unidentified
RQRRNELKRSP

SEQ ID NO: 670 - protein, 38 aa, unidentified
NQSSNFGPMKGGNFGGRSSGPYGGGGQYFAKPRNQGGY

SEQ ID NO: 671 - protein, 42 aa, unidentified
RMRIZFKNKGKDTAELRRRRVEVSVELRKAKKDEQILKRRNV

SEQ ID NO: 672 - protein, 8 aa, unidentified
PPKKARED

SEQ ID NO: 673 - protein, 8 aa, unidentified
PQPKKKPL

SEQ ID NO: 674 - protein, 12 aa, unidentified
SALIKKKKKMAP

SEQ ID NO: 675 - protein, 5 aa, unidentified
DRLRR

SEQ ID NO: 676 - protein, 7 aa, unidentified
PKQKKRK

SEQ ID NO: 677 - protein, 10 aa, unidentified
RKLKKKIKKL

SEQ ID NO: 678 - protein, 10 aa, unidentified
REKKKFLKRR

SEQ ID NO: 679 - protein, 20 aa, unidentified
KRKGDEVDGVDEVAKKKSKK

SEQ ID NO: 680 - protein, 17 aa, unidentified
RICLQAGMNLEARITII

SEQ ID NO: 681 - skipped

SEQ ID NO: 682 - RNA, 81 nt, unidentified
  source 1..81: mol_type = other RNA
ggaaatcgcaaaatttgctcttcgcgttagatttcttttagttttctcgcaactagcaagctttttgttctcgccgccgcc

SEQ ID NO: 683 - RNA, 81 nt, unidentified; identical to SEQ ID NO: 682
  source 1..81: mol_type = other RNA

SEQ ID NO: 684 - RNA, 81 nt, unidentified
  source 1..81: mol_type = other RNA
ggaaatcgcaaaattttcttttcgcgttagatttcttttagttttctttcaactagcaagctttttgttctcgccgccgcc

SEQ ID NO: 685 - RNA, 83 nt, unidentified
  source 1..83: mol_type = other RNA
ggaaatcgcaaaatttttgctctttttcgcgttagatttcttttagttttctykcaactagcaagctttttgttctcgccrcc

SEQ ID NO: 686 - RNA, 203 nt, unidentified
  source 1..203: mol_type = other RNA
ggaaatccccacaaccgcctcatatccaggctcaagaatagagctcagtgttttgttgtttaatcattccgacgtgttttgcgatattcgcgcaaagcagccagtcgcgcgcttgcttttaagtagagttgtttttccacccgtttgccaggcatctttaatttaacatatttttatttttcaggctaacctacgccgccacc

SEQ ID NO: 687 - RNA, 76 nt, unidentified
  source 1..76: mol_type = other RNA
ggaaataagagagaaaagaagagtaagaagaaatataagatctccctgagcttcagggagccccggcgccgccacc

SEQ ID NO: 688 - RNA, 89 nt, unidentified
  source 1..89: mol_type = other RNA
ggaaaccccccacccccgtaagagagaaaagaagagtaagaagaaatataagatctccctgagcttcagggagccccggcgccgccacc

SEQ ID NO: 689 - RNA, 59 nt, unidentified
  source 1..59: mol_type = other RNA
ggagaacttccgcttccgttggcgcaagcgctttcattttttctgctaccgtgactaag

SEQ ID NO: 690 - RNA, 46 nt, unidentified
  source 1..46: mol_type = other RNA
ggaaataagagagaaaagaagagtaagaagaaatataagagccacc

SEQ ID NO: 691 - RNA, 56 nt, unidentified
  source 1..56: mol_type = other RNA
ggaaataagagagaaaagaagagtaagaagaaatataagaccccggcgccgccacc

SEQ ID NO: 692 - RNA, 79 nt, unidentified
  source 1..79: mol_type = other RNA
ggaaactttatttagtgttactttattttctgtttatttgtgtttcttcagtgggtttgttctaatttccttggccgcc

SEQ ID NO: 693 - RNA, 79 nt, unidentified
  source 1..79: mol_type = other RNA
ggaaaatctgtattaggttggcgtgttctttggtcggttgttagtattgttgttgattcgtttgtggtcggttgccgcc

SEQ ID NO: 694 - RNA, 79 nt, unidentified
  source 1..79: mol_type = other RNA
ggaaaattattaacatcttggtattctcgataaccattcgttggattttattgtattcgtagtttgggttcctgccgcc

SEQ ID NO: 695 - RNA, 79 nt, unidentified
  source 1..79: mol_type = other RNA
ggaaattattattatttctagctacaatttatcattgtattattttagctattcatcattatttacttggtgatcaaca

SEQ ID NO: 696 - RNA, 79 nt, unidentified
  source 1..79: mol_type = other RNA
ggaaataggttgttaaccaagttcaagcctaataagcttggattctggtgacttgcttcaccgttggcgggcaccgatc

SEQ ID NO: 697 - RNA, 74 nt, unidentified
  source 1..74: mol_type = other RNA
ggaaatcgtagagagtcgtacttagtacatatcgactatcggtggacaccatcaagattataaaccaggccaga

SEQ ID NO: 698 - RNA, 79 nt, unidentified
  source 1..79: mol_type = other RNA
ggaaacccgcccaagcgaccccaacatatcagcagttgcccaatcccaactcccaacacaatccccaagcaacgccgcc

SEQ ID NO: 699 - RNA, 79 nt, unidentified
  source 1..79: mol_type = other RNA
ggaaagcgattgaaggcgtcttttcaactactcgattaaggttgggtatcgtcgtgggacttggaaatttgttgtttcc

SEQ ID NO: 700 - RNA, 79 nt, unidentified
  source 1..79: mol_type = other RNA
ggaaactaatcgaaataaaagagccccgtactcttttatttctattaggttaggagccttagcatttgtatcttaggta

SEQ ID NO: 701 - RNA, 79 nt, unidentified
  source 1..79: mol_type = other RNA
ggaaatgtgatttccagcaacttcttttgaatatattgaattcctaattcaaagcgaacaaatctacaagccatatacc

SEQ ID NO: 702 - RNA, 74 nt, unidentified
  source 1..74: mol_type = other RNA
ggaaatcgtagagagtcgtacttacgtggtcgccattgcatagcgcgcgaaagcaacaggaacaagaacgcgcc

SEQ ID NO: 703 - RNA, 74 nt, unidentified
  source 1..74: mol_type = other RNA
ggaaatcgtagagagtcgtacttagaataaacagagtcgggtcgacttgtctctgatactacgacgtcacaatc

SEQ ID NO: 704 - RNA, 79 nt, unidentified
  source 1..79: mol_type = other RNA
ggaaaatttgccttcggagttgcgtatcctgaactgcccagcctcctgatatacaactgttccgcttattcgggccgcc

SEQ ID NO: 705 - RNA, 79 nt, unidentified
  source 1..79: mol_type = other RNA
ggaaatctgagcaggaatcctttgtgcattgaagactttagattcctctctgcggtagacgtgcacttataagtatttg

SEQ ID NO: 706 - RNA, 79 nt, unidentified
  source 1..79: mol_type = other RNA
ggaaagcgattgaaggcgtcttttcaactactcgattaaggttgggtatcgtcgtgggacttggaaatttgttgccacc

SEQ ID NO: 707 - RNA, 79 nt, unidentified
  source 1..79: mol_type = other RNA
ggaaaattttagcctggaacgttagataactgtcctgttgtctttatatacttggtccccaagtagtttgtcttccaaa

SEQ ID NO: 708 - RNA, 104 nt, unidentified
  source 1..104: mol_type = other RNA
ggaaatttttttttgatattataagagtttttttttgatattaagaaaatttttttttgatattagaagagtaagaagaaatataagaccccggcgccgccacc

SEQ ID NO: 709 - RNA, 57 nt, unidentified
  source 1..57: mol_type = other RNA
ggaaataagagagaaaagaagagtaagaagaaatataagagccaaaaaaaaaaaacc

SEQ ID NO: 710 - RNA, 76 nt, unidentified
  source 1..76: mol_type = other RNA
ggaaatctccctgagcttcagggagtaagagagaaaagaagagtaagaagaaatataagaccccggcgccgccacc

SEQ ID NO: 711 - RNA, 47 nt, unidentified
  source 1..47: mol_type = other RNA
gggaaataagagagaaaagaagagtaagaagaaatataagagccacc

SEQ ID NO: 712 - RNA, 47 nt, unidentified; identical to SEQ ID NO: 711
  source 1..47: mol_type = other RNA

SEQ ID NO: 713 - RNA, 15 nt, unidentified
  source 1..15: mol_type = other RNA
taagcccctccgggg

SEQ ID NO: 714 - RNA, 15 nt, unidentified
  source 1..15: mol_type = rRNA
taaagctccccgggg

1. An isolated or recombinant polynucleotide comprising:
(a) a nucleic acid sequence that encodes a polypeptide having the amino acid sequence of SEQ ID NO: 334 (No. ID405), SEQ ID NO: 58 (No. ID414), or SEQ ID NO: 564 (No. ID418), SEQ ID NO: 335 (ID406), SEQ ID NO: 331 (No. ID411), SEQ ID NO: 20 (No, ID415), or SEQ ID NO: 445 (No. ID419);
(b) a nucleic acid sequence that encodes a polypeptide at least 50%, at least 55%, at least 60%, at least 65%, at least 70%, at least 75%, at least 80%, at least 85%, at least 90%, at least 91%, at least 92%, at least 93%, at least 94%, at least 95%, at least 96%, at least 97%, at least 98%, at least 99%%, at least 99.1%, at least 99.2%, at least 99.3%, at least 99.4%, at least 99.5%, at least 99.6%, at least 99.7%, at least 99.8% at least 99.9% identical, or 100% identical to SEQ ID NO: 334 (No. ID405), SEQ ID NO: 58 (No. ID414), or SEQ ID NO: 564 (No. ID418), SEQ ID NO: 335 (No. ID406), SEQ ID NO: 331 (No. ID411), SEQ ID NO: 20 (No. ID415), or SEQ ID NO: 445 (No. ID419); or
(c) a nucleic acid sequence at least 50%, at least 55%, at least 60%, at least 65%, at least 70%, at least 75%, at least 80%, at least 85%, at least 90%, at least 91%, at least 92%, at least 93%, at least 94%, at least 95%, at least 96%, at least 97%, at least 98%, at least 99%%, at least 99.1%, at least 99.2%, at least 99.3%, at least 99.4%, at least 99.5%, at least 99.6%, at least 99.7%, at least 99.8% or at least 99.9% identical to a sequence selected from SEQ ID NO: 365 (No. ID405), SEQ ID NO: 74 (No. ID414), or SEQ ID NO: 565 (No. ID418), SEQ ID NO: 366 (No. ID406), SEQ ID NO: 331 (No. ID411), SEQ ID NO: 30 (No. ID415), or SEQ ID NO: 487 (No. ID419).

2. The isolated or recombinant nucleic acid sequence of claim 1, wherein the nucleic acid sequence encodes a polypeptide having at least one activity selected from endonuclease activity; endoribonuclease activity, or RNA-guided DNase activity.

3. The isolated or recombinant nucleic acid sequence of claim 1, wherein the nucleic acid sequence encodes a polypeptide which comprises:
a. one or more α-helical recognition lobe (REC) and a nuclease lobe (NUC);
b. a Wedge (WED), α-helical recognition lobe (REC), PAM-interacting (PI), RuvC nuclease, Bridge Helix (BH) and NUC domains; or
c. one or more domains selected from RuvC, REC, WED, BH, PI and NUC domains.

4. The isolated or recombinant nucleic acid sequence of claim 1, wherein the nucleic acid sequence encodes a polypeptide that recognizes or binds crRNAs.

5. The isolated or recombinant nucleic acid sequence of claim 4, wherein the crRNA comprises a crRNA sequence from Table S15C.

6. The isolated or recombinant nucleic acid sequence of claim 1, wherein the nucleic acid sequence encodes a polypeptide which comprises one or more mutations.

7. The isolated or recombinant nucleic acid sequence of claim 6, wherein the polypeptide comprises one or more mutations in one or more of the RuvC, REC, WED, BH, PI and NUC domains.

8. The isolated or recombinant nucleic acid sequence of claim 1, wherein the nucleic acid sequence encodes a polypeptide comprising a nickase activity.

9. The isolated or recombinant nucleic acid sequence of claim 1, wherein the nucleic acid sequence encodes a nuclease-deficient polypeptide.

10. The isolated or recombinant nucleic acid sequence of claim 8, wherein the nucleic acid sequence is operably fused to a nucleic acid encoding one or more deaminases.

11. The isolated or recombinant nucleic acid sequence of claim 1, wherein the nucleic acid sequence is operably fused to a nucleic acid sequence encoding one or more reverse transcriptases.

12. The isolated or recombinant nucleic acid sequence of claim 11, wherein the one or more reverse transcriptases comprises Moloney Murine Leukemia Virus (M-MLV) reverse transcriptase.

13. The isolated or recombinant nucleic acid sequence of claim 11, wherein the nucleic acid sequence encodes a nickase.

14. The isolated or recombinant nucleic acid sequence of claim 11, wherein the nucleic acid sequence encodes a nuclease-deficient polypeptide.

15. The isolated or recombinant nucleic acid sequence of claim 1, wherein the nucleic acid sequence is operably linked to a nucleic acid sequence encoding one or more nuclear localization signals.

16. The isolated or recombinant nucleic acid sequence of claim 1, wherein the nucleic acid sequence is operably linked to one or more expression control sequences.

17. A vector comprising the isolated or recombinant nucleic acid sequence of claim 1.

18. The vector of claim 17, wherein the vector comprises a viral vector, a retroviral vector, a lentiviral vector, an adenoviral vector, an adeno-associated viral vector, a vaccinia viral vector, a poxviral vector, a herpes simplex viral vector, liposomes, lipid nanoparticles (LNPs), cationic polymers, vesicles, or gold nanoparticles.

19. A host cell comprising the isolated or recombinant nucleic acid sequence of claim 18.

20. The host cell of claim 19, wherein the host cell comprises a prokaryotic cell, a mammalian cell, a human cell or a synthetic cell.

21. The vector of claim 18, wherein the vector comprises an LNP comprising:
a) one or more ionizable lipids;
b) one or more structural lipids;
c) one or more PEGylated lipids; and
d) one or more phospholipids.

22. A composition comprising the isolated or recombinant nucleic acid sequence of claim 1; and a pharmaceutically or veterinarily acceptable carrier.

23. A composition comprising the vector of claim 21; and a pharmaceutically or veterinarily acceptable carrier.

24. A polypeptide or an isolated polypeptide comprising:
(a) a polypeptide having the amino acid sequence of one of SEQ ID NO: 334 (No. ID405), SEQ ID NO: 58 (No. ID414), or SEQ ID NO: 564 (No. ID418), SEQ ID NO: 335 (ID406), SEQ ID NO: 331 (No. ID411), SEQ ID NO: 20 (No. ID415), or SEQ ID NO: 445 (No. ID419);
(b) a polypeptide at least 50%, at least 55%, at least 60%, at least 65%, at least 70%, at least 75%, at least 80%, at least 85%, at least 90%, at least 91%, at least 92%, at least 93%, at least 94%, at least 95%, at least 96%, at least 97%, at least 98%, at least 99%%, at least 99.1%, at least 99.2%, at least 99.3%, at least 99.4%, at least 99.5%, at least 99.6%, at least 99.7%, at least 99.8% or at least 99.9% identical to one of SEQ ID NO: 334 (No. ID405), SEQ ID NO: 58 (No. ID414), or SEQ ID NO: 564 (No. ID418), SEQ ID NO: 335 (No. ID406), SEQ ID NO: 331 (No. ID411), SEQ ID NO: 20 (No. ID415), or SEQ ID NO: 445 (No. ID419);
(c) a polypeptide encoded or expressed by a nucleic acid sequence at least 50%, at least 55%, at least 60%, at least 65%, at least 70%, at least 75%, at least 80%, at least 85%, at least 90%, at least 91%, at least 92%, at least 93%, at least 94%, at least 95%, at least 96%, at least 97%, at least 98%, at least 99%%, at least 99.1%, at least 99.2%, at least 99.3%, at least 99.4%, at least 99.5%, at least 99.6%, at least 99.7%, at least 99.8%, at least 99.9% identical or 100% identical to a sequence selected from SEQ ID NO: 365 (No. ID405), SEQ ID NO: 74 (No. ID414), or SEQ ID NO: 565 (No. ID418), SEQ ID NO: 366 (No. ID406), SEQ ID NO: 331 (No. ID411), SEQ ID NO: 30 (No. ID415), or SEQ ID NO: 487 (No. ID419).

25. An isolated or recombinant nucleic acid sequence encoding the polypeptide of claim 24.

26. A vector expressing or containing a nucleic acid encoding the polypeptide of claim 24.

27. The vector of claim 26, wherein the vector comprises a viral vector, a retroviral vector, a lentiviral vector, an adenoviral vector, an adeno-associated viral vector, a vaccinia viral vector, a poxviral vector, a herpes simplex viral vector, liposomes, lipid nanoparticles (LNPs), cationic polymers, vesicles, or gold nanoparticles.

28. A host cell comprising the polypeptide of claim 24, or a nucleic acid molecule encoding that polypeptide, or a containing the nucleic acid molecule.

29. The vector of claim 27, wherein the vector comprises an LNP comprising:
a) one or more ionizable lipids;
b) one or more structural lipids;
c) one or more PEGylated lipids; and
d) one or more phospholipids.

30. A composition comprising the vector of claim 29; and a pharmaceutically or veterinarily acceptable carrier.
